United States Patent Application Publication US 2026/0137732 A1 - sequence listing, part 6

SEQ ID NO: 4 - DNA, 3151654 bp, Akkermansia muciniphila (residues 1-1,575,827 of 3,151,654)
  source 1..3151654: mol_type = genomic DNA
ttataataacgatagttgtaatagaccagagccaatttgccatcgttcatctcgctggaccactgtacgggttggacgaggttgcctgtgctgcccactatcccatagggcgagtagtcgtaagccgccgcgatcgttccctgcccatcaaaaacttccgtcacattcttgttgaagtcccatccatagcagtaaagagaagcgtcctgcacgagggccaggggacgcgtggctaccggttcctgaggatcccacaacagtgtccgaagcacgttccggctgttgagcatgtccaaggcagctagttgcaggtagccacggtacaggtagcgttcatggctggtgaccgttccgttaaccgtcaccttcttcatgtagcggtgtccctggtagtcgtagccgcattccaccaccgtactgccgtcccggctggtgaaactcaccgcgcggttggccgcgttgtacacgactgtccagatacccgttgatgttttgatcaagggttgttccaaggaggaagagggagatttgagagtggagttggcaatgctaatactatggtcaaggaattcctaatgacggtgttgcatatggcaaaaccgcgggcgggtaaagtggcctgcggtattgaacacatcatatttctggaagaaatttccagattcgagttgatcacggaccatgttcggaagtgctgagaggggattgatgactgaatttcggtatcagcaatcatgcagtatcccgacaagattattctgcataattccgattatattgttactatttctcatgaggagaaatagctattatgactaaatatttatctccttgaattatttttttatacaatatgaaaatctcaccaaatgggaatgttataaattcatgtttatccgtttctttatattctttttccaaaaatttatcccgaatatgcaacatactataaggtgtaagatctcctttcaagaaatcatcatttattaatgaatagatttcaggattttttattatttcttcattaaaatcattttttactcctgaaacatccagaatattatctgtacttatgcctgaataagagactcttgcgtccagtccgtcttgtaatttcaaggcctgcaagtgaatgcaatccgtccattgctgatcagtttggaaaatataaattattcttattctcccccgtatcgaagtatgcagcctccacgaattctgaggaactcccatagtatttgtcatcattttttctcatgtatcgggttggggaggagatttatcgcacccactgagaataattattaacaaaattatataaattttattgcataaagtattcatattaaatatcaatagagttaataatagtttccaattcactaaatgtaaaattaccccaaacttcaattggaaaagctgctgaggaatccactttgtcctgaacttgccattcaggatctccctctgtaggattagcgtcaattacatcgtaccaagttaaagataccccttcagaagacaataaaataatatcatcttttgattttacacaaattttaattttccataccctaatactttttgcgggcgacctaaccaccaacctgaggaatgaagatggaccccagactcgtatcctagatggacagaaaattttgcagtaatatcctttttgtctacaaaatctatctctatgctttttggataattatttatattttctaattcttcttttataatttgttgtagtgcttcttcaaaagttctttgcattcctgcagaatctctcatttgagctatcattgcaggtttagaagggaaaggaactacagttcctattcctctcaaaaagtttataacataacgagcatatattaattcacccagagtatcttttcctaagtaatccgtacatatcatgggaacatttctcacgaacccgtacaaattccatcccccttcttcagcgatgggatcgcgattgatccacctgccgtctgcgggattgtaataacgatagttgtaatagaccagagccaatttgccgtcgttcatttcgctggaccactgcaccgactgggcatgctcaatgccgctatttgccgatactatggtaaaggcagttctcatggatgaccatcatcttctatctgttaaatctgcagcaatctcacgcaggaaatatgaaatattaaaacaagatattccattcattattaaaaattggtttaggttagactaaatagtcattcaacgcttattctcttttaagaaaatctcgtatattttcaatgatgtatactgtattactatcaggaaaaacaagttcttttttgtttttcctttcaaaatatcccatgccaccgaatgtaccttttggagtattcgttgcacaataggtcaattttccaagatcatctttttttatagggaaagatatttcgatctcatgtttgcttgtaacatctatgatggtcgtaattttttgagatttattatcgtaacggtaaacaagaaaattaattttatctcccttgttcatgggttttacaactgtataaaattcaaataaattttctctttcgattatttctagctccacgtatggactctttttagaaagaaccaaggatttcgttgtgtcaactaatatgggagaggcttttatattagggacagtaattattatggataataaaataatttttgcaatcataatcattttaatttgttttcgtatgcttttaaacgttgagataaaaaattaattcttgtagcaattctctttctgcatgtcttacttattttcggttttgtgagagattctcgtaaacactttatttctattccatgcgcttttatctcagattctatcaattctcgtccatgagtcgggctgacaattcctcttcctgctggataaggttttcctttgtcatcaaatgctattcttgggttggcagcaaggatgtcgctcaaatggctttgctcatgtttcattaagcaatccagacaacacttcctatctatactcccttccggagcttgacccagataaacttccagcccacctttaccatcagtaactacggtatttattttaggtggcctcggacctacttcccaaagtcctaatacatccgcccctgtaacaggtgagttatggcaaaaaacatacagattgggtaattcaaaagaaatattctgtttttttaactcactcttcaaatatatttctaaaaaattctcttcttttaatggatcgcgattgatccacctgccgtcagcgggattgtaataacggtagttgtaatagaccagagccaatttgccatcgttcatttcgctgctccactgcaccggctggacgagatttcccgtagaagcaatctgtccgtagggagagtagtcataagacgccgcaatagctccctgcccattgaagatctctgcgacgttcttgttgaagtcaacgccatagcagtaaagggtattaacggtaacacttcatcaccccggataaaagacacctttttataaacagtttctataatgttgttagcccatgaattgaaataaatatttattttttccatgtattgtattagccgaaaatgatagaaggaagagaaaagaaagatcggactactcaggggagaagagaaatgccggattcgattttattcatcataatcttctatatttcatcacagaaatcaaaaaaactggatattaatattttatatttttgagaggaaatatattttttagacgattctctttgatcttcagatttatttccattctctttaccataagactctggaaatgcaaatgagtcatagtcataatatttttcgaaagattttctccatttgtttttattttctttgacgtaaagaaaatattcattctcccatccatcaaaaccttgatgtgataaattctgtttttctagccatattgtaaaacatattgctaatagtaacgcatggtgggaatcagcaattttagaattgtcaatacatgataagagattgtgtatttcataaaattcggacaaggaattttttcttaaaaaacatgcatttatcttgactatcggcgttaatattaaaagatggcctacttttaatttcaaattttggaaacctcagtcctttaaatattttagacatatatacttgcaaagcattattccacccctcatttattaaaaagtaagtatatatatctgattttttttcaagaactgattgaaacaatcctttctgttcagattttttaagaatattatcatattcgataaatattttcatcaaatcgttatagcatcgttctcttataaatgaattttttattaaattcatcttaagaaaatcaactttggtaaatagaaaaagaagactgttctttttccaaaagctccttatccaaagatcatatttattatctttttcgcacttgacacacgtttcttctgattttctaatttctgcattcgctttagtagcgataacgccggatatcattaatataattataaggattttcattttctaaagttatttttacaatacaaaacaatgagaacgcagaaatttctatttcttcaatactattttagcattgcgcaataaatcatttacggatttctccatggtatctttaagaacttctgggaattgttctgatatttctactctgttcaataatctaatcatgagatctttattgcttgtagctgatccttttgactcctcccatttatattcttttttgtcatttttaatttcacacttacagaacttagcgcttatggaaatttcaatataatcaatagtcattccggcagaagtaccaatttctgtaaatatattaaaagcttttttaaatttattaacgctactgcatactctgtccaacattttcaataattttatatgctttttaattttatcggaagctttgttcttgatggaatcttgaaaagctgattttattgcaccttccggatcttgtatcgtaatactatttctagctagagtgtataatactatggaaaaagcaagatctttatgttttttcaaattttgttctgagcattcagcctctaaccctaatctatcaaattgggcgataatgttattacataaaaaattgtaaatattaattcccccttcttcagcgatgggatccctgttaatccacctgccgtcagcgggattgtaataacgatagttgtaatagaccagggcgagttcttcgtcgttcatctcgctggaccattggacgggctggacgaggttgcctgtgctgccaactgtcccatagggcgaatagtcgtaagttgccgcgagcgttccccgcgcgtcgaagacttccgtcacattcttgttgaagtcccatccatagcagtaaagagaggcggcctgcaccagggccaggggacgcgtagccaccggttccagaggatcccacaacagtgtccgaagcacgttccggctgttgagcatgtccagggcagctatttggaggtagccacggtacaggtagcgttcatggctggcgaccgttccgttgacggtgaccttcttcatgtagcggcgtccctggtagtcgtagccgcattccaccaccgtactgccgtcctggctgatgaagctcaccgcgcggttggccgcgttgtagactactgtccaaatgcccgtcgaggttttgatgagggtctggttgcccgaggcgtcgtacgtcggcacaaaaggcgcctccgctttttcttcgatgctggtgtactggttgaggttgttggccgcgtaggaaagttcctcggccagttcccgcgccgtcttgcggttgccgatgttgtcgtagctgtaaccgtagggggctgttcccaaggtagccccggtgagttcgtttctgccgttgtagttgaagctgtcagtacgagttgcttcggttccccgctgctgggtgcgggtgactgggcgtcccaatgcgtcgtagctctggctgcgggagaccagcgcggtttcccccagacggcagcttatggccactgccaggtcacggtgttcttcataggcaagttcccggacgatgccgttgggcatcgcgaggctggagggcaggctgcttcccgccaggtagccgtaggcgaagctttgctccgttccctcgtgcatgattccggtgccggcaagcctcccgttggcttcatagccctggcttgcttcctggaggacgtcggttccctgtttcagggtatagccggaggaccggccgtaagcatcgtagttttcctggagctggcaggaggcgcctcctatggtgatgctatcggtgtccggttcgttgtagggggtgtaagtgatggtgcgagagcctgaggcgtccgtcacctgggtcagctggttgaggtagttgtaggcgtactggatgccgggcgtggagtcgctgtaggaaacggaggtattgactcctttcttcaggttgtagccccaggtggtgaccacaccccgcgcgtccgtgagcgtggatctgaggttcagggcattgtaggtggtgtcttcatgggtgccgtccgcgtaggttttacgcgccaacagccccgtggcttcatcatagctccaggtggtgacgtctccgtccgtgcgtcccgcaggatcggtggtgatgtcgcccgcgtcctcccggaaggtggtaaggctgaccattctgtcggcttcgtcgtagccgaagagcaggggctgggcgcccgttccccattgcgccgtattgcggccccggagatcgtagttgtagcatgtcgttttcccgagggcgttggtgacggcggaaggctggtcgaagtaagggctgtaggccgtggaggtcgtgtcgcccgcctcatttgtcaccgagacagtacgcccggcgatgtcggtgcgcgtcgtgaccgtgttgccacggccgtccgtgttagtgtagatgatgcctgtttccgcataggctcgggtctgcgtggaagtaatacccgcgtagtccgtttgcgtagtaacgaagccgtcgatgacggtagcggtggccgtgatgtcggaggttggtacggtgcttttttgcgtccgcagggcgcctgttccgtattcgctccattgcgtggatatatttcctctgggatcaatggagatcgttttgctttccagcgtggccgagagagaggaaaccagcgtcttctgcgtttcgttataggtagtgccctggccgttgttcctggtcgccgtaacgacgcggtagacgccgtcctgcgcctgttccacgccgtagctccacgtggtgatgcgcgagttggacacggtggccggatcggcaagcttccaggtttccttgaccttattgccgaagtcgtcgtattcccacagggtcggcgccatcgtcgtagctgcggtttccgcatctgtctgttccttggtcagctgtcccttggcgttgtaggtgttcctcgtgtaaatgactccgccgacggtgttggggacgcccgtacgcagggtttcgccgacgccgttgacgatcattctttgcagctcgatttccgtctcaccacagatggctttcgtgaaggtccggataccgtcattgaccaagtcaagggaatataccaaatgccgctgccccgtgccagcctgttccataatcgttccgtccggggcgttgcgcgtgatgaacgtggctccggagggagtggtctgcgtcgtcgtcaagccgtcctggctgtaggcgtaggcggtgacccggcccaggacgtccgtagaggaagttatcctccccagcaagtcgtactccgagctttcgctggtcgtcatggcccccgtatcccggcgcgtagagaggatgcgccccgccgcatccagggtgtaggtggtgatggtttccggcgtgatgacggtttccccgtccattacggcggagcggatcgtttctaccagttggcgcgccgtgtcgtaggcatagtccgtcctgatgccgttttcatcaatgtcccacaacaggcgcccgtcgcacatcagctcgcgctccgttattcggccattgcccgccgtccgcttcacccacctgttctgcgtgtcaaattcataggaggcgctgtctgtgatggcccattccccgccggtgagcagagcgtagctttcttccctgacgcgctgcccttccgccgtgatccaggtcgtggtgcgcgtgctctgtcccggcacggtttccccgttgacgcgcgtttccaccgtttccgtgtagagggcgccgtgctccgtcgtggccgcgtagtcgtgccaggtttgcacgccggtgacgtcccgggtcatccgggtgcgtccgcgggcatagacgtcgggcgcgccggccagccattgttccgtggccgtcaggcgcgttcccgtcacacctaaccccgtgaccctcttttccgtccttttgacgtggttggctgtcgtgtacttgtaggccgtggtggtcagcgtcttgacgtgtccttccagcggaagcaggtctaccgtttccgtggcgggttcgtcgttgaagtcggcttctcccaaatgcgcataggtgtagcgcgtgatgcgccttccgctttccgcccacggttcgtcgcgggagagcaggcgtccgtagaggtcatacgcgtaatgaatttggctgccgtccggggcagtttccgtcttgagccgtccgcactggtcgtaggcgtattgcgtggtctgggcttccaggctttgatagccttccacttgagtgagcagcaaatcgcctacgtccgtcgtttgatagatggagcaggtgcgctctgccacgatacctcctttggagatttccgtcaccagctgccagaccgagtcttccggttccagctccgtgcgcgtgcggatggtcgtgatggcgtcttcccccgttcccctccgcatgttccacgccaggccgtcgttccaccaggtgacggcgtagggctgcctggccggcgcctgttccgtgacggtgaattggctgtccgcggaaagggaaaggttgaatgttttaaagggtgtcccggtgaccgtataaaatccctgttcgtccgttccggtgatttggccgggggtatagagagcgatggtgtaacccgtggaggtgacgttttccacgttgagcaggccgtcccacaggttccagatttgcctcagcgagccgtcttcggcatgcttgacgtccaggtaggatgacgcgttggagatgacctgcttgtcggtggtggtgtaggagaggagcgttcctgtttccgccgagaagaggtattggctgccgtcttccacgatccagcgaaggcaggattgtccttccaccgtgtccagcgttgcccgtcctccgcccgacgtgtccacgccaacgggcagcacggacccgttcatgtagcagcgcatggcaatcacccggtctccctgcaccagatcaaaacgcactccgggtacaattcccccttcgggcacgtccaggcggctgttcaacggatggttgtaggccagtgaggaggggctttccaggccggagacactttcctcactcctcaattccacccggcccgcaggaatccctcccagccccctgaatgttccgaagttgcaggaccagtacatcagggtggccgtgctttccgcactcacactgcaccctgcggaggaatagtttcccagcgtgctgtttcccgccgcggagcccgaccgggccagcgacggggaaggcggcgttccgccgctgttatcacacgtgtctccctcgcacgggcacttctcgggctcctccttgcctcccggctccgtcggcactacgtcgatgctgtagttgcagatggagacgttgtctttttcaggcttgtagtcgatgttggtctggttgacttcccaaatgtaggagccggagggcagctgcgccccgccggtccccgtgtggtatttatggccgccctgctcgcctgccgtctgcgagtctttcttcaggttcacctgcgccaccacgctgccgctggaatccttcacttccaggcttccccagtcgtccacccccaggaagagcgaacaggtgccgtagagcttttttccgtccgctccttccggaatggtaaagtaaccgtgagcactgtgtccatccgccgacgtactgggcggtcccacggtaatttcatcgtgttcgtggatttcctcgaacggtagcggatcgggctccggagcggcgcgcatgccacgcggcatgggtttggccgtagagccgaagtaccatttgcggtaagcggggatggaagaaggggtgccggcagaagaagtagttggagtattcataaggcatcaaagaagggattgatgatgaaatttgaagagagcaatcctccatgatcattttcccagtagcatgatccagatccagtgtcaataaagtttatttgagaatttctgtttgcctatgaaacataatgattttttccatcaaaaaataatataataattcttacgctcagtaccttcctgttacagacatcaatattatctatttgttagaaaaaatccacaataggatgtcattcctgcttggcgccagtcaaattcctgtaaaaaatgtctctcccatggagaaagaatggttgatgattcagtagtttgtcttttcgaatttgtcgcaacttctgaaaacccttaatcaaaaaatacatcttttccgaagtttttctatgaaaacgggaggagaaagattgccctccatccgtagaacccttacaatttttgtcatgcctgtatctccggcgcgcattctggaagatttgtcccccttctaccggcaggaagaatttcccgtgcttctgcaccagtgtgaaacgtgggcggaaagccgcccgttggagggatgccgtgtgattgacgcctcccccgtattccggaatacctgcgccaaatacgccgccctgctggcggcgggagcggagttgacggcagcagtctctccggtgatgccccacgatccggaaacggtcgcgctgctgggcaggtatggaatacccgtggtggaggcggaacgggcggacggaccctatgacgtggtgatggactgcgccggggcgctcagccatgttcccagccgctgcgggtatgtggaactgacccggtccggagcgcagcattatacgcgctgcacacagcccgtgtggatggtggacgccggaaaaatcaagcagatagaaacctgcctgggaaccggggaaagctttttccgcgcgctggaagcgctgggaattgagagtggcccgggacggaccttggtagtcatcgggtacggaaaagtgggccgcggaatcgttctgcacgcgctcaggcggggcttgaacgttatcgtggcggatgtggaggaaaaacctctccctctgtcctccgcctcattcgtgcgcgcaacggatggagaagctctcaccaatgcagtcaggcatgccttctgcgccgtcacggccacagggcggcggcatgccctgtcaggagtgattgaccccgctgtgacccgctcctccggcgttctgctggccaatatgggcgtggaggacgaatgggggccggagatcccgaagaaccgcctgctgaacggaggccgcccccttaatttcattctgccggaccctacgcaaatgtgctacatagaccctcccctggcgctccataacctgggcgccgtggagcttgccgcaggccgcgccatgccgggcatttttccgccgcctccggaaatggaggaagctttcctttccctgatccgctcccgcggttccctgccgccggacatgctggactggatttcctgacttatcatcttgtctttgcaggaatgaaggagtatcgtacagagtacggctgggggcttcgcgttccctggccggcctgacgcttcattgacttcgcaactcatgaacacttattattcctaccgcagctaccggctgggagggagactcctcggcaccctggggtgcggcctggcctgggcattcttcgggtccggatggtggagctttctcctcggcgctcttctcttgttcctgtggcttcccgtcattctggggagaccttattttctcacaatcacttcctcctccatctcctggggcaacagcatttcacgcaaggaaattccatgggaactgattgagcgcataggatgtacgcccgatcatgaatctgaacccggactgatgattgaactgaaagacggccgtattctggatgtggaatcctcctgcttcggttccctgcctcccgtacgggaagccattctgcaagcctccggttcctatcctttccatcttgctccggatttgttcgccgatccggggttgttgagcgaatgacgcggcggagcctccttagacccgctgcggcactccgtgccttcccttgcgcctgaaccgcacgttcccggcgccggaaggtgtttatacgcgttttttccggtgccatgccggcacgcctgtttttttatccctcccccggaaatcaccgtccggtttattgccgacggtggaaaatgaaaaatgttccacgtagaacattcatgtgaataacccagtcatcactttcattttcaatcaataaaaaacaggcgccgtgacagcacggcgcctgttctcgtatgaatgattttgtaccatcaaaatcagttgggagatctcattggcatgagcacgtacaggaactcatcacctatcttcaatacgcccgggctcatttcatcaatgaggttcaacgtaatgatcgtatccccggccatcgtcttcaggggagccatgaagaaatccgggttgaaggaaatggaaagcggccttccggcataagtgatcgtcatggattcatgagcttcacccacgccttccgcgctggaagccacttcgagttcgttttcacggaagttcagcttgatgttcgtgcttttgtccacggaaaggagggacacgcggcgcaccgtttccagcagttccccacagggcagttcaatgctttccttgcagtccgtcgggattacctggcggtagttcgggtaattgccgtcaatcagcttgctgatcagcagcgtatcattgatttcaaaagcggcctggttgcgggtgaaccgtacggtgacggtccccacttcatccagaaggcggcggagttcaccaacggccttggtgggcagaatggcgtccagttgctgttcttccgggaattccagggcggtttccgccagggccaggcgacggccgtccgtagccaccagagtcatcttgccgttgcggaaggaaagggaaatgccgttcagcacgtagcgggtcgtatccgtagagatggcgtattccgtgcggcggatgcagtcgcgcagcaaattctggtccacctggtacacggtcgcctgttcaaaggacggcagttcggggaattcgtccgccggaaggccattcagcttgaactgggagcggccgcattccacagtcgcctggttgcgctggttgacgtccacctggacttctgcttcaggaagctcgctgatgatgctcaccagctttttggcgggaagagtcacggtgccctcgcgcagcacgttcgcgggaactacgccggtgatgcatacgtcaagatccgtagccgtaaaacgtacctggccgttttcagcttcaatcttgacgttggaaagaatgggcagcgtcgtcttggaagacaccacgctggcaacctgtctcagaccgtcgagaaatacttgcttggaaatggtaaacttcatgtgtctgtgcttttatctgcctcgcatcctctcacaagtgcctcctgcgattcaagccatttctccgtcaaaccctaatatttggcagtatttttttaaaagcataccatatgtagtaatatgctatttctccgggcatatcttgcatgaaacggtttttcaaattatttaagtattcttaaaagtccgttctccggcgaacaattcccggttgacgcgcacgcggatttcgaatccggggtcaaattatttttttaagaacaagccggttaacaaaaagaaagatcacggaaaaataaaagcatgaaaggaaacataaacagcgctttttccggatcgtgtatatgttcaatgaatttgccgctttccagaggaaaaagaacggcatccggattcgaaatccgctacttttcagccaagcttcggcgattttaaacaacaaagactttcagaatttctgtgaaacgttcattcatcattttgtctttactggttgcgggaggcatggcccatgcggcttctcccatttattcctgggagtggaccacggaaggaacgcaaataactgctcccggctggaacggttcattcaattatacaaccggcaacgattatgccactttcggcagcggctccggcggaggcacgccctacaactctggcatagcgggaatttcaggcagtttcaccgtcagcttcgacctgaaaaacctgagttccaccaacaacgcctggaaagacgttttcagcttgtattccaatggaacggtttccggagaatccaacagcatggtacttgaattcaatgcctctggggaactttatttttacaacaagggatttggaggccaatccggcggaaacatcaatacaggcctgacctggacggacctccagcaggacaactggaacaatctgagcatcgtttccgatctttcctcccagactctctccgtgtacgtcaacggcgccctggcaggtacgatcaccggctggaatccgtcctcccctgccctgacaggctcccaatttggagcttcctttggaaacacccgtcccatgaacggaaccatagatgtcaacaacatcaaattttacgacggcgttgtgcttcctgttccggaagcggccactgcttccctggggctgctgggcctggccgccctgctgatgcgccgccgccggagctgctaagcatttgccgttatccagcaagaggccgtatgccgggaagggttcccccgcatgcggccttttccgtattccggcacttccgtcccggaattcatgttcccgtgaatgtttcccccggcatggtccaggcgccgggcggaaccaccctgcccggcaaaacaacggtattggcgcccaggcgcacatgatccccaatgacggctcccagcttgttccttccggtaatttccagcctcccggccgccatcatcctgtgctccccgccgtcatggcggaaattggaacacaccgttccagcccctaaattgacgtcgctgccaatgatggaatcacccgcatagctcagatggggaataaacgtcccgtctccgatgatgcagttcttcagttccaccccctgccccgctacacagccgtttcccatggacacatatcctctcaaatggcagttgggcccaaggcggcagccgtcccccacccatgcggagccctcaaccaccacgccgggcatcaccacggtgccctttcccacacggagactgcccaggacgtaaacgcccggccgcccggaaaaatcgtctccctccattccctccatcactctctcctgccagtccagcaggtcccagggatagacgaggcgctccacagccgcctcccgcccggaaaaaacacgtgacagtccgttccccggccctttccgggccagcagccgcccttcttcattctgtacttcccctgtcccgcaggaagcaagccatgcggcagcttccggggaaaaatcatgcatggacacctctaccacttccgccgcactttccgtaacggcggcttccggattaaaaaccgcctcaaagcccgcttcccggagccgggaggcacaataggcggctatgctcaccccggccacggaaaagccgcggaaaggcctctcagggctcgttgcgggaaaggtatggtccctttccggaatgtaaatcaatctggcaaccctcatggaggaatggtatgctttcttacggcgcttccgcaagacggaacgtgcggctccgtttcacggttccacttgccaataaccctgtgaaaggataagtcaattaactgtgagtatggtgtgaataagttattcagatgttatccacatttttatgaaccgaatttattcacactggcggatgatttcaatccattcattcccaggcggtaaaaacgttgttcacactgggcacagggtagaagaagaagaaatttaatattgttaaatctaatattcttcaatcacacaacgtgattgtcctttctcgcgcattcgtgctacaaggtcggcatgaacacggaagaccaggatacgcgctggatgaacatggccgtaaaactggccgaaaaaggggtcgggctgacaagtcctaatccctgcgtgggagcagtcatcgtgcatgaagaccaggtgatcggctccggttttcatgaaaaagctggcctgccccatgcagaaaggaaggctattgccgatggaacggccagaggcaacgccgccctgtttgcggattccactctgtacgttactctggagccgtgcagcaccaccggaaaaacgccaccctgtacggaagccattctggaacaccatttcaaacgggtggtttatggctctcaagaccccaatcccagacaccgcggcgccgcggctgatattcttgggagagcaggcatccaggtcacccgcgggattctggaaaaggaatgcgatcatttaatccggggattcaggctgaacatgctggaggggcgcccatgggtgatcgcaaagagcgccatgtccctggacggccgcatttcacgcagtccggaacggtcccagtggctgacgaatgaaaaatccaggtctttcgtacataccctgcgggctgagtgcgatgcgattcttaccggaggaaataccatgcgcctggacaatccgtccctgaccatcagaaaaccggaccgtcccgtttcttcccttaaggaacagccctggcgcattatcctgactcacaacgccgcatccattcctgcggattccgtttgcctgacggatgaattccgtgaccggaccctgattgtagagaacgtttcaagttatttggaattattaaaaaatctgtataatgaaagaaaaacagggactgtcctgctggaagcgggaggctgcctggtccgggaattcctgaaagccggcctggtggatgaatgggtgggattttacgcgcccatcataacgggcggcggcgcagacggcgtgacgggcggttcattcctggaacgtgaagcctttcttgagcagccggttgtgagcatctttggaagcgatgtgtgcatccggggcgacgtaagctaccggtgacgggaacagccaattattcattcgccttccggatgtttttaaaccgggaaagcatctttaattaccggtgagcctgccattcggcggtttttctcatcattatgcatcctctctgttcgtgtcccttttttaagacaagccggatggcatgaaccgagccggaaacgtatcggtcatacaggggaaaatattcaggaaaaagacctccccccctcttttataaaccggagcctgcagggagtggaaaacgggtcatagggagagcatgaggcttttaccgtgcatgcaagttttcagcattcaggagccgggctgtattcaaatttaaagccccggcatgaaaacggcgcaggctttcatgcctgctgcctgccgcgcttttgcaaatgaacaagcagcagggcaatgtccgccggagtaatgcccggaatgcgggaagcctgcccgatagtggcaggacgtatgctgcccagcttgatgaccgcttcttttttcagggcgtgaacgcgttcgtaatcaatgtcggcaggaatgattttactttccatccgggtgattttttccgcctgttttttctgtctttcaatgtggccttcgtactggatatccgtggcaatggcatccaaatgttccacgtggaacatttttttcagttcttcaggcagcagggtccagtcattgcctggcctcttgagccaggtggaaagggaaacgccttcatgtttaagcaaagctgcttttgctattccttcctcaatggcgttttgtctgtcttccgttttcctgaacgtttcgcgggtgatgaggcccgtttcaaaagccaggggggccaggcgcaggtccgcgttgtcctggcgcagcagcagccggaattccgcccggctggtgaacatgcggtacggttcgtccgttcccttggtgacaaggtcgtctatcatgacgccgatgtaggcctggtcgcggcgcagcaccagggagggcttgcccagagttttcagagcggcgtttgttcccgccatcagaccttgcgcggcggcttcttcatagccggaggtgccgttgatttgtcctgcaaagtacaggttttccaccagcttggtttccagagtagggtgcagctgcgtgggagggcagaaatcatattccaccgcatatcccggacgaatcagttgggcgttttccaggccgggaatggtgtggatgaaatcgcattgcgcggagtagggcagggaggtggaaacgccattgaggtagaattcctccgtactgcggccttccggttccaggaagacctggtggctggttttttccgcaaagcgcacgattttgtcttcaatggaaggacagtaccgggggcctatgccctcaatgatgccgctatagagagggctgaattttaaattgtcccggatgatgtcgtgggtggcctgattggtgtaggtaatccagcacggcatttgcttcatgcggaagtcttcgtctccccatgtgttcagggtgcagaaaggttcggaagcgcgtttcagtacgtcgcgggaacggtaactgaacagagcctccggcgcgtctccgggctgcatttcacaaacggaaaagtcaatggatcttccattgacgcgcggggaagtgcccgttttaagccgttccacttgaaagccaagcgcggcgaggtcggtggaaaggctggaaggagcgcagcccatgcggccgcccgttatgtgctgaaggcccacgtgcagcagcccctgcatgaatgttccggagcagatgaccacgctgcgcgcgcagatggtgtagtccagggaagtgacggctcccgtcacctgctgctccccgttgacgagcagtttgaccacgtcaccctggaacaggcgtatgcccggggcggtttccagaaccattttcattcgtgcgcggtaggccgttttgtcgcattgggcgcggggtgcgcgcacgctgggccccttggaggcgttcagcatccggaactggatggcggtggcgtccgtattcagtcccatggcccctcccagggcgtctatttcccggacaatgtggcctttggcaagccctccgatggccgggttgcaggacatttgcccgatggtatccaggttgtgggtcagaacggcgacggagcaccccaggcgggaggcggccaacgccgcttcaatgcctgcgtgcccggcgccgacgacgaggacgtcgaacaggggggaggcgggggaaggagaggaattcatcaggatgcggagcaaatggcaagacggtgcagaatcagccgcggatcaagcgaagaagataccagggccttgtccgccttcatgcattcctttaaagtctgcttcaaccgttccgtcttgaatttggaagcgttctgcgccgccaggaaaagcgggtacgcattgggagtgccgtcttttttcaggggaatcagcgcggcggcataggagggcagggaggagatgcgggccgtaaattccttgaagttggtgggcttcagattgaatgcgtcacataaaagcctggcggccagcagatttctcagcgtggggatgaacgctgcgcgcatgatcgtgacggcgttttcaccgcgttccagctgaaaatcaatcagggagatggccgcatcgctcttcttgttttccagagcacgtgaaatttcaaaaataacgcccgtgcgcgtcagcggaaccatgcgctccacatcctccggcatcacggtgcgcctgtccgcgcccagataaaggtccagtttttcaatttcggaaataatctggcgggaggattcgctgacgcggtgaatgaataactccagagcggcggaatcgaagttcatgctccgcgcgcctgcctccttgttgatgaggggcatcaggctgccttcccagccggccttggtgatgtccggcttgttcagttcctccgcggcggcggattggagcaggaatttgttaaaggaacggcgcttgtcaaattcggaagcggagataagcagcaggacgtccggtcccagccccccttccagcagatgcctgagagagtccagggccgcttccgtggtggaggaacgccccgtgacggaatcccccagaaaattgcagttcttcatccagaccaccttgcggcccggaaaaaacggcagcgtgcgcagggcttccatgacctggcgcgtcacctggtccgcttcatcggaatcgccgcaggccgcttccaggatttcatgggaaaattcattcgtgccttccgtcagggcggcaaagatgccggaagccttttcacgcaccattccttcgtccgtaccgaaaacgaggtgaatggcttgttgttgtaaagtgctggtacccataaaaccgtacccatacggtatcataaaatatgcctcgttaaaagacgtatttgtcatttgaaagttttttcatttgaagagaataggcttaaatagtatcaatagaaccggaatgtcaaaaagcggctggagtcttccaggtccatttttcaggcatctcctcgtgatcaagccgcaaaccgtttgatcgttactacggcagggcatttccatgagatcgactatatggacacgggctttacttgtcatcatgatgacggttatgatgaccgtcgtcgccgttgcctattggaggtggaacagccgcgttacggagaagaacgtttccttccggtctgaggtgtttacgatggcgcagcagtccgaactcaaggaggaggacgttcccatcctgcaccagctcaatgaagaatattcacgcgtcgcccggctggtggaacgggtgctggtcagcatagacaccacgggcgtgaccagcgtgccgcagccttccgaagacggcgaatccatgattgaaaaaaggctggcggtccatggcctgggttccggcgtcatcgtcacggaagaggggcatatcattaccgcctaccatgtcattcagaacaagcatgcgctgcgcgtcacgctgagcaacgggaaaagcgtttccgtgcgcctggttggggtggatccggagctggacatcgccgtgctgcaggtggaaaacccgatggccttcacgcctcttccgttcggcaacagtgacgagattgcacccggcatgatcgtcctggcctgcggcaacccctatggactggggacgacggtttcccgcggcatcatcagcgcccgtgaacgcaagctggtggattccggcctggacctgatccagacggatgccagcatctttcccggcaattccggagggcctctcatcaacatccgcggtgaaatcatcggcatcaacaaatcggtgcttcccaatgtggagaaaaactacgctggcatcggctttgccattccctccaatctggtggtgcacagctttgagcagatttgcaggcatggacgccccatgagaggatacctggggctggacattgtgcgcaatactcccccgctccgcagtttcctggactaccatgaagcaggcggcgcagtagtcaacatcgtgaagcccggttccccggcggagcaggcgggccttcagacgggagacgtgatgctgagcttcaatgaagttcccatccagaccgacaaggatgtgaaggaccacattgaaaatctttccatcggcgacaaattccggctgaaaatctggcgcaagggacaaaaaatgaacgtcaccctgaaagtgggggacagcattttaaagaacgttccttctccgtgggaggactttatggaaggagtaggcatgcacctgcgtgaactcaccgctgaggaacagtccatcggcgcgcggggattgctggtcatccaggtgaatccgaagaaatccgtggggcagatcctccaggccggggacatggtctttgccgtgaatcatcagagcgtcagcaccatggatgcactggtcagggctttgagggaggggccggccctgctgaccgtttcccgtgacgggcagcagttcaacgtgaaagtggatgcccgcccggtttctgaaaagacgctgctgccccgcattcccacggcgacgaagagcaacgccatcatgccgcgggagctttgaattccgcctgtgcggcgtctgcggaagaccgcatccggagaagcgttttccggcatccttatgccgcgggcttgactggcagtcaaaagcgcctataatgcatcacctttaagaaattaaacttatgactcgtcatactatctccgtacttgttgaaaacaaatttggcgtgcttgcccgcattgccggtttgttcagtggacggggctacaatattcattcgttgaacgttgcccctagccaggacccgcgcttttcacggatgaccatcgtcgtacgcgaaaaggaggatgttctggaccagatcatcaagcatctggaaaaactcgtcaacacggtggaagtagtggatttccgcaacacggacaacgtgtaccgggaaacggtattgacccgcatcggcgtggattccgcttcgcggcatgaagtcattgaattctgccagatcctgggcgccagcatcgtggacgtcacgcgggacgccctgaccattgaagtgacgggcggtgagcacaagattgaccgcttcctgtccctcattgaggattacgacgtccagatgctgacccggagcggccgcatcgcccttcccaaaccccggcagtaaagaaatcctttccggcttttccatcaaccctgcaggacgttcttgcagggtttttttctccctccatcatgaacatcacttatccggacctccccatttcccgccgccgggacgacattctggcggcgatgcgggagcatcaggtcattgtggtggtgggtgaaaccgggtccggcaagaccacccagctccccaaaatggccatggagcttgccgcggaggcgcggggcagggtggggtgcacccagcccagaaggctggccgcggcttccgtttcccgccgtgtggcggaagaactgaattgcgaactgggcggcctggtgggctaccaggtgcgctttgaggaaaaagccgggccggacacgcgcctgaagttcatgacggacggcattctgctggcggaaacgcagcatgatccggacctgcgccagtatcatacactgattctggatgaggcccatgaacgcagcctcaacatcgactttctgctgggctacctgaagcttctgctggacaggcggaaggatctgcggctggtcatcagctccgctacgctggatgcgggtggcttttccgagttcttcgggggcgcccccatcgtccaggtggaaggccgtacctatccggtggaccttcattacctgccgcctctgcgtgatgatgaagagctccccgcccatgtggcgcgcgccgtggactggctggacaccctggacgaccgcggggacgtgctcgtcttcctccccggagagcgtgaaatacgtgaagtggcggaaaagctggaaggccggaatttgaggaacacgcgcatcctccccctctttgccaggctgggccttggagaccagcaaagaatttttcatccggaacgcggctgccgccgcatcgtgctggcgaccaacgtggcggaaacgtccctgaccattcccggcatcatttacgtcattgactccggcctggcgcgcgtcagccgctacagtccggcgcgccaggtgcagcggcttcagatagaacccgtctccaaggccagcgcgcgccagcgtgctggccgctgcggccgcgtgtgcgagggcgtctgcatccgcctgtacagtgaggaggactgggaggacaggccggacttcacggacccggaaatcaggcgcagcgcgctggccggggcgcttctccggatgaaggacctgggtcttccggaaatgccggaattcccccttccggaccctccttcctccaagctggtcacggagggctaccgcaccctgcgggaaatcggcgccctggacaaggcccggcagctcacgcccgtgggcaggaagctggcgcggctgcccattgacccgcggctgggccgcatgctgctggaagcgcagcatgaacaggccctgccggagatgctggtgattgtggccggcctgggcatcatggatccccgggaacgtccggcggatgccgcgcagaaggcggaccaggcccacgcgcagtggaaggacgaagacagcgatttcctgtccctgctcaaactgtggaaggccgcatggcaattccgggaaggccgccgctggcgcaaaaaccagctccggaaatggtgcgtgaaaaacttcctcaatttcaaccgcatgatggaatggttcaacctgtgggaagacctttcccggctggtcagggaaaccctgaaatgcaaaattcctcccttggaggaggaaacggagcgtcaggcgtcttttgccatgattcaccggagcatcctggcgggcgttccgcgccagttcggcctctgggatgcggacaaccgggaataccgcggcgccgggggacgctctttcggcatctttcccggttccggcctgttccgccgcaagaagcggagcgaatgggtgatgggcgtggagctggtggacaccacgcgcctgtggatgcgccgcgccgcccggctggagccggagtgggtggagcaggtagccccccatctctgtgaatcccattattccggagcccggtgggacaaagagcagggcgcggtttacgccgtggagcgcgtggtgtgcggcggtctgcgcatcattgacaacaggcgcgtgcactatggccgcattaatcccgcccatgcgcgggaaatcatgatccgtgaagggctgctgggcggcggcttccgcaccaggcccggctgcatcacccatctggaaacgctccgggaagaggtgcggcagatagaactgaagctgcgccgcccggaccaggtctggtgcgaggaaggcgtttttgaattctttgacaggcttattccgcaggactgctgcacggccagggcctttctgcgctgggccggaagcatggaaaaaaacaacccggacgccctgcacgttccgccgcaggaggccatgtatgatttctggggcagggaccttctggacggctttccggatgaaatttcctgcggcggcgcggaatacgccgtgtattaccagaatgaccccggcgcggaagatgacggcgtgacgctgggcgtccatatcgaccagttgccggacgtgccggaatggctgccggaatggggcgtgccgggccatctggcccagcgggcggaaggcctgctgcgcacccttcccaaggacctgcgcgtctttctccagcccatcagccaaaaggccgcctactttgcggaactccggcatggcctggatccggacggcccgctggcgcagaagctggcggaattcgtggaagcggaaaccgggcgtttctgcgctccctccttctttgacatgaaccgcattccggcggagctggtcacgaaaatctgggtgtgcgacgacgaaggagaagagcttgccatgggtacggacgttgcggagctgaatgcgcggctgggcaaaaagctctcccgccggttccgggaaacagcggcggacatcgtatccgtaaccggaatgaaggaatggacctgcggagatttggagcgcacggtggacgtggcgggaaggccgggttacatagccctggtggatgaaggcccgtctgtaggcgtccgcgtttttgaggatgaactgcgcgcggaagaagcccaccggagaggctgcctgcgcttcatgcgcctgcgccagacggaccaactcaaccacctccgcaagaaatttccgctgaaactggaagggaagctctccctgcacatgctgggccgggacccgtccaccaatgcggacgacctggtggacgtctccgcggagcttgccatgggccgccccctgccgcgcacggcggaacaattcgccgctgcggaaatgagcctgcgccagaacctctttgacgccgcccacagcgtggcggacatttgggagctggtagcggccacggagcatgccgtcagggactttgccgccgcccagcagggcgtgcgccatacggagcgcatcacggctgacctccggcgccagcttgactggctgctccgctcccgcttcctgtgggcgcatggggcggaacgcctgccggacctgaaacggtacatgcagggcatcgcggaacgcatcaggcgcatcggccagcagcccctggccagggagctggaacgcctggacctctttgaacgcgtgtacctcccctggcatcagggcctgccggaacatgacggcgacccgcgctggacgcagtacggctacctgctggaagaataccgcctggccgtcttcgcccccgccatctccgtcaagggccgtatttctgaaaagcgcttgatgaccgcttttgaagagctgtcctgaaagcccggttcccggaatggggcgggtccggatttacaggcccttggagagctgggcgaattcaatcagatttgtttccttgccgaacaggatcaggatatcgtggtcttcaaagacgaggtccggggaaggggtgccaatgacgggaatgcgcgggatggagaggatttcccggcgcccctgcggggtctgggcttctccgcggcggatggtgagcaggttgagatggtgctccgtgcgcaggcccacgtcccggaggcgcttgcccacccagatgcgcggcacggctatttccacgatgctgtggttctcatccatgggggagacgcgcaggaattccggggattccagctggctggcgagctgcttggaggccacgcgcgacaggttgatgagcgcgtacacgttcatctggcttaaaatgtgctcgtgcaccgggctcatcacgcgggcgtaaatatagcgcacgcccattttctggaggtgcgtgacgacgaggaggttttcttcaaagctgtccccgatggcgacgatgacggcggactggtcatccagctccagttcgcgcagggcggccggattggtgtaatccgtcaccacggcataagtcaccagatccttgatctgctccagttcttcatccgtggaggccacggccactacttcaatattgcgggcggaaagctccgtgcagagctcctgtccaaactggcccaggccgataacggtatatctcataacggtatgttcaggttaacgggattttgacggatggatagcggtaatgccgcggggtgggggtaccggccagggcgatcaggaaggcgaaaagccccacgcggccggcgagcatgttgatgatgagaagatatttggaagggtcgctcagattgggcgtgattccccgtgacacgcctaccgtagcaaaagcgctgcagttttcaaagaagatatccagtgagctcatggcgggctccagggtgcaaataagaatggtgaagcagccgatccaggcgcaggagaccaccaccgtgatcacgcaccgcgccacggtgcgctgctcaatgcggcggtggaagaatcccacgtggtcccggccgcggaggatgcgcaggatttccgcgcccgcaatggcacaggtggtggttctcatgccgcccgccgtgccgccggggctgccgcccaccaccatcagcccgcacatgatgaggctggcagcgggcaggtagcggctgtagtcgctgatattgaatcccgccgtacgggccgtgacgctgtcaaaaaggcagctccagagatgctgccccagcggttcggaagtgtggggggcggaaacggcgaaaatggacagggcgcccccagccagcagaatgcccgtggcgatcatcaccagcttgaaatacggggtccactgcatgcgcaggcggcggtgcttggccagaaagcggttgaccagccgggagttgatttccttgtaaatgccgaatcccaggccgccgcatacaatcagcgccatgatgacggcctgcccgctgtagcacaggcggatgcccggctccatcaggttcatcgggaacgtggaaaagcccgcgttgcagaaggcggaaacggagtggaagagggagtgccaccacaggggttcccccatcaggttgatatcctttccttcccaggaaaagtacaggagcacggccccgcacagttcaatgaacagcgtgctgactacgatggtggtgatgaaggagaccacggaccccaggttcccttcgtccagcaggtccgtcagcagcacgcggtcacgcagggaaaagccctggcccgccaccatggccacgaagtaggcgaacgtcatgatgccgaagccgccgatctggatgagggcaagcgtgaacatttcccccagcggggtgaaagtgctggcgaagtccacggcgttcagaccggtgacgcacacggcgctggtgctggtgaacagggcgtccgtaaagctcagcgtgatgcccggatacgtggaattggggagcagaagcagcccggtgcccgccaggatgaccacccccagggaggtcacaaactgcatggcgggagccatcagcgggcgcccttttttctgcttgcccagcagccattcaaaaatcctggtcagggacatcagcgtggggatggcgatcagccctgccgtaatcaccaggcgggaaagctccgtaaacctcatgtaactgtcctcctgctgctccctggcgatcaggaggaagatcagcaggcagctgatgatctggaaaatcagaagcctcagggaagggcggttgatttccttccggaagtaggagcccagcacccccgccaggtggcccagcgtggcgacggccgcaatcaggcgcgaccattcatgttccgcccgcgtcaggggccaccccagctcccagatgaccgcccccagaaggatggcaatgcagacggctgcaagtttggtgaatcccgagcgtgtggttgtcatgggtggagatgccttgcgcggagtctagcacctggacatggaaagaaaagctattaagccgtttgccccatttcgccctgtttactccggttatttccaacgcgcgcagaggaaaggcggctggggggaggaaggcataacttccagttaaattcccgggctgttcaggtccggtcacggagcgccgcaaaggctggcggcgctcctgccggcttcgggaacagggggaaaaagtcaggccctgcggcgcattgccagcagagccgccatgcccaggagtcccagcagggcacaggacggttcggggacggaaagcgtcacgattcccgtggaagcgtcgtaatccagcacattccagccatgggcggcctctgccagggaaaaatcttccgcagaggaaagcccttccagggtaccccctgaaatgtccgtaatcctgaaggacatggtgccggcgcgagcaaggatgccgctgacgtccagagtcaggccgtccagcaggttcaaggcgcctcccgtcatgatgatggcggccagcccttcgcctccttccaccaggttcatggatgaaagctccacggtaaaattccccgccgccaggctgtcgcccgttcccagcgtcatggaattgccggccaggatgcgggagccgtcggacaaggcgagcgttccctccaggtgctggtccgcccagaccacctggtggccgatttccacccgtgcaacggtgccccagttcagcacctcccctccggacaggcggatggtgttggaaacgtcataacggttcaaatccagcgttcctcccgtgtgaacggccgccgttcccgtgcccagggcgcttttgtctccgagccgcagagtgcctccccggatttgggtccctcccgcataggtattggcatgggccagaaccagcgtattgccggtggtcttggacaaggccccatttccggaaatcccgccggacagggtcaggacttttccggtggcgttggtggagcttccgaaggaggaaacggtgccttcctccagaatgaaacggttgctccacgtattggacgtcacgtgttcccagccggcaaggacggttgccccctggagcgtgacggagcccgttccccagccggagccggcggtcttggtatccgtgccgttcattgttaattccacgccgggaccgacggtccagtttcccgtaaaagcggcggcatccgtattgacgtaggcgttgacctccactctggcgattccggagggatcagccgcaagggtggaattgcggatggcgacgtctcccgttcccgtgatgaacgtgagctgatggttgccggaagaactgctcccccggatggacagggtgcttcctcccgcaatgttccattgctggtcgccctgaagctccagcacggaagcgatgttcaggttttttccggttgcgatgtcgatgccgccgctccccaggatcaaatggccgtcctgcatggagggagcggaactgccgtcaacggccacgccccggatggtgatggtgttcaggtatgtatcttcaatcctgatgccgtaaagcacggcgttggttccggcggcggaactcaccatgttatccttggcggaggaggctgcgtcccagacggccgtgctgtccacggggagcttgccgttcatccaggcttccgtggaagagagagcggcgtcgtaatttccgctgcggaccgtacccgtatcgtacccggccagcctggccgcctcataggcataccgcgctccgatggtgatctgggactttccgtcgtaatgaacccccatgctgtcgccggaggtgattttggcgaggtcccgtgtcggaacccagcccatgttgtcgtttgcccgggccagggcttcctgctggtcgcgggttgttccggaagaaccttcattgccgttgaatcctccggtgacgtcccccgtttcagcattcgtgacgttggttgtgccccacttggcctgttctcccagaatggcctgatgtgccgccagagagccggtgtccactccatcccgggcaaggtccccctgcaagttgtccagaaacgttaaaaatgaattggcggcattactgttgtcagtgactgtattggactctccctgaaggtacattacgcccatgatctccacgttgtcgtaaccgttggccagggcgttttcacaggccttcctgacggtctccactatggcattataggcgttcgtgcctttgttccaataggaattgcctcctccgtccagagcggccttgacgattcccatgtccgcatgtccggagccagggccgcccagggaccatcccttgcgctccatcatggcggcaaagccgtactccggccccatgcagttgtaattgcttgactccgttccgcacacctggggtacgacagaaccccaggaagaggaagctggcggattgcagtctacggaactgccggtgatcttgttgaaattattgtgccagaatttggtgcttccatcggacctgtactgttccagcagctccgcggacgccggagaccccttgacggctcccagggaattggattgtcctgtcaggatgtataattgaagcgtcttggcttctgccgcgccgatgaaggccgccgttatggggatgaacagcagactgcggtaaagtgatgaaaatttcatggcagttggattcaaagggataaaaaacaaaagccgctggctgcatgaaaccgccagcggcccgacaggaggaaattttactttctccggcggcgcaggagcagtgcgcccagccccagaaggctcagggaggcagtggccggttccggaacgttgatgatggctgccaggtcatcctgcgttgccgcgccttcccagaagctgaggccggataccgtcggggaactctggttcccgttcaaggttgcccagcagccgatatagagctggtccagatttccggcttgggccatgttgggccatgacacggtctgagtggtgccgttctgcgtaatgaacacgttgtaggctccccctgcctgaacggagagagtcagtgaaaacgggctgttgaagtcaatggcggtgctgcttaagccgcttgcgggacgtcccgagctgccgccattgttggcgatgcctatcttgccgctttcatagcgtcctacaatggaattaagaccggttccgccaatggaagcgcagaagagggaatcagtgttgtccaggctggcggcgctggagaagttaatgttcaccgtatagccggcagctccggaaagctgaagggaagaaacgtcaagcccgtttttctttgaattggtcgcattggacgtccatgttccgtcgttattccagatagcgtcgttaagcgtccagctgagggacttcgttcccagatcggaaacagcggtgccgctgtccggtgaagtctggtcaaaccgggaaaatccggaaaccagggtgacggcggcgtggccgccggaaatgccgaggagcgtgacggccagaagagaaagtgttttcttcattttattaaacttttgagtcaaaaatactggaaggaagtatttccacccgtttaccggattaagaatccggtttttttatgtgaaatacaaattttgtataacttgcggagcaagtatggaaaggatgaattcaaaaaagaccaggaatgctataatgatagtattttcaatgtattaaaatgtacagtaaattaattgttaatattttttattgtttgcggattcttaatccgcagacatttattgaacaggaggaggaaagcgtgtgtaaaatgctttctatacatttatccatttattgaaattcaaggaattgtcttcaaatttgatggagatgacaaagaaagcctgcaacgggatatttataggaaagagacgttttttcccatcataggcatcctgcggcaagccgtattttaggcttcccctttgctggcggtgatggcttgataaggccgtgctggcaaaaagaatcattccatgtctggacgtaacggacggcagagtcgtcaaggggaccaatttcgtcaacctgagggatgccggtgacccggtggaatgcgccagggcgtatgatgcccagcaggcggacgagcttgtttttctggacatcaccgcttcttccgacggccgtgccaccatggtggacgtggtgcgccgcacggcggcctgctgcttcatgccgctgaccgtgggcggaggcatccgctccgtaaaggacatgcgtgaaatgcttctggcgggcgcggacaaggtgtccctgaatacggcggccatcaaccgcccggagctgatcaatgaaggcgcggcggccttcggcagccagtgcattgtcgtggccattgacgccaaaaggcaggctcccggcaaatggggcgtttccacccatggcggccgtaaattcgtggggctggatgccgtggaatgggccgtggaggcggaacgccgcggtgccggggaaatcctgctgaccagcatggatgcggacggggccaaaaccgggtacgatattgaactgacccgcgccgtcagcgaggcggtgcgcattcccgtgatcgccagcggaggagcgggcagcctggaccacatggtggacgtgctggtggagggcaaggcggacgccgtgctggcggcttccatcttccactttggcgaatatacggtgccggaagccaaaacctactttgcctccaggggcattccggtgcgtccgttggcggaatagcggaaacgctcttttttcttgagagaaaacggaattcctgcacgtaatatacgcatgcgccgttttctttttcctctgtgttccgttattgccttaacgtcttttgctcaggcccagtcgccggacaggcaccccgtgtatgaacccgccctggtttccgccggagcgccgggtgatgcgggcaatctgtttgccggggccaaagtcaccgcttccgggcattacggcaacgaccgtccggaactggccgtggacggccaggcgaacaacgccggcaaatactggggctgtgagggcattcccgtctggcttcaaatagacatggggaagccccgcgcgctttccgccctgcatgtctggccgtattgggaggggggacgcatttacaaatataaaatagaaggctctgaagacggcaaaaattggaaaatgctggcggaccagtcttccaacagcattgcggccacctcggaaggcgttcccttcaaattcaatccccggacggtccggtacgtcaagatcaccttcctgggcaacaacgccggcaatgacaagggagggcacctggtggaaatcaagggctacggccctgatgccgccctgaacctgcaagccgcggcggtgaaggattatgaccgcatcccttacagcggcgctcccaggcaggaaatgcttcaggattccgtgcgcctgtccggctggaggggtgaacgcgccggggggcagattgccgtctggtcttcccaggcgcagccccagttgtccgcctcctgcgccggggtaaaaaacgctgccggacaggtcattcccgtccggacctccatgatacgctacaccaagggcggcaacaggctcatttcagatatcatcggcagtgaaaacagctgcgacctgcaggcggggggcgtgcgtcccgtctgggtggaagtcaacattcctccgtccgccaaacccggcgtgtacaagggaaaaatagtggtctccgctgaaaacggctctcccgtgagcgttcccgtagttctggaagtggctccggaatttctgcctgcgcccgccaattggcaggttcacctggacctttggcagcatccgcaggctgtggcgcgctggcatgatgtggaaccgtggtctccggaacatttcgcgctgatgaagccggtgatgaagaggctggcggatgccgggcagaaggccattacctgctccctgattgatgaagcctggaacgcccagacctacgactggttcccccccatgattgaatggatcaagggcaagaacggaaccatgcgctggaactacgccaactttgacaaatgggtttccttcatgatcaacgaagtgggcgtcaagggccagatatcctgctacaccatgattccgtggaacatgaaagtccgttatctggatgaagctaccggaaaatacaagttcctggacctcaagccgaacgacccttcctacgaagccatctgggggcctttcctggcggatttccgcaagcacgtcaagagcaagggatggctggacaagacctgcatcgggctggatgaacggccggacgccatggtgagggcggccaagaacgtgctggacaagtatgccccggaattcaaaatcgtttcagccgtcaaccagcctaccgccttgacccgggacgtgtatgacgtctctcccgtgatcgaccatgcggatacggtcacgggcgatttgctggcgcagcgcaagaaggaggggaagaagacgacgttctacgtctgcgtccatcccaaaaagcccaacaccttcaccgtctccccgctggcggaggcggaatggctgcccctctttgccgccgccaaccatctggacggctttctgaggtgggcctacaactcctggaaccgcaatccgtttgaaaagacggacttcggcaactggcccgcgggagactgctacctggtttatcccggcaacctcagttccctgaggtttgaaaaactccgcgacgggctggaagaatttgaaaaggtcaatatcctgcgcgcccgcgccgcgaagaacccgaaggcgaaagccgccgtggcccgcatggatgaggagctttccaagctcttcaccgtggaaagaagccgcggcgattcccatgaggacgacgtgcgcaaggcccgtgaaatcatccgtaaaacggcggaagccgctagatgattttatagcttccgcgttttcgattctttatttttataaaaagcttgtccttgtctttcaggttgctgggagacaacgggcaagctttatttattgttcttccgtctctgggagcgagcagtttgggtagtcctttggactttccgcccgtagtggcagcatttatggaatttgcttattttcaacaggagggagtagaggcacgtatcatccgcgtttaattcgtcaagtaatggttgaatcccaaaaaaccgatatttacgatggcattccataaaaatactaaatgcaatgaataacgcaatttcagtaaataacggtgattcccggcatgaaataaagattgaaaacgggaagatgggctcaacgggagcattaaatcagaaacacgatcagggatatgcggaaggcgtcgaatttaaatatggattcatttcttccacggaaggaacttccgaccgtgcttccagaatccggaaatggtatgccctccgcggaacaaaaatagaatactggtccgtagaaagtgatcatgttacatgtgcagagctggattctgacaaaacttccggaggcatcaaacaaaggatcatgttctttgaagacagggattcgtttgacactccggattacgccgcgggattttatgtaatttcgtggaaggaccggggcaggcgcggtgatgatggcaacaaggttaacaatagttaccatgttaaagtcacgctgggagacccgtcgcagaataccggagaagtaatcgcctcgttgaatgtcaaggagggtgaaattatcccgggggaatggagagacagatgcttgctgatgcgcctcaagcgttcccaggaattcaatacgggaagggaggacatatggctctccatggaatgtgaggaaggcggaacttttggaactctgattacggaagtggatattcatcccgtcaccttgaaggcttttccggctccgctgtttggagtatcggaaagattggtcgtaccgcaggaagatgatcattccgatgcgctgggatatgtggacggcaggaatactgacacgattgcatggattgattatgcagagacaggttccggccaggaaagcagtcctagaatgcccagtttgcattttgaaataaaagggttggatgccgggcgtttttcctggaaaaccaggttgacggtaagctacagccgcccggcgatccaatatgcagatgcccctgccggaacccgggatcgcaaccaggccgttttggataaagatacagtacatgtcccttccattccgggaaattggaaagaacagccagtgtccttatggaatattgcggaggatacggattggcttggagaggtgaatgaaggcttttttggaggaaatgccagtctggagtttgaaattaaatccaaaaacggccactcctcctatacaggcgcggatatctatcgtttccgcatcggagggcagaatccggacgatcaaatgtgcacccggtatattcagtcctacgtgctgcaaatgtatccggatactttggccgccatggaatggtgtcttcccgccgtaggcaaaagcgaatcatttggatatggcggcgaggcggtttattaccccttctcctggagtaatgccccgtcatccttgtacaatcaatttttagccggaggcggcaattaccggagggaacccggggcggaaggaattccgcttcatagccaagatgccgccggcgccggcggttacagcatttttcaagtgacgggaacggcagggggagacggcatatataccgccattccaagggagcaaatatggaactggcagaaaaacatccaggcagcccttcaaatcatccttgtcaaatacaatgaggcgcacaggtggatgctccgtcaactccagcagcagcaggcggaagcgcctgaaagtgctctcccggtttatcgtgcggccgataccaatccaggccagggggttccttatgattattcatttgcggaaggaacggactgtaccatcgcccagctttgcacgcttaaggcatataacggagcttccaaatgttcccggcagattaacgaacccggcaccaaggtgcgctcccccggttttctttatgatcccggaaaaagcggccactactgcgcctggatgaatacttctagacaatggtgcatttccagatataatagcaataattttgattatgtggacagggttctgtccagggtaaatcaaatttagaatgaatgctttaatcacaggattatgctttttatgctgctctgccgccttgttaaaggcggcagagcagccgcctgttttttcccttcatttttcccagcttccttcttttctccagtggaatattcgcaaacaggtttccggacagggcgatcttattgaatcatggacgggctggaatcctgcattaaagaattcagacggccccaacggcggccttgtttttatgcaggaaattgatcttgtgggagacaatggaaaagaaagaattttcctgtaccggaaccctgaaatagctggaactcctcccccgcaggatgaacatgtaaggtttatctgcaatgcggataactcttatctttatacggttccttccttctgcctgcacgggaagaaaatcggcagtgtttttcgtggtgaagaagcttattatttttgtcctgacaggtatgttaacaggtatcgctttatctatggatggaagcaatgggaactgacggaacagtatggcagggtattggaatggagcggctgtgaagagaccgatcccaaagatggaacccgctggaaaagcggcatggagcagacggaaagcgtttatgtaaatacgggcgtcattagggaaacatgctccctttccccaggccgccgccgggtgcctctttcccaggaaaccgagggtgaagatccgtttgaaacaatagtaaaagaaaaggccaaatcgcctgcatcacctgaacaggaaaaattggcagaggacatgccctctgaaacggtttgggttgtgtccctctttgaacttcttacacaggatgctccccagtggaaatgttttaaggcggtttctttaaaagaggcggaaaaagaatggaggaaaatttccggtcctgcccttgagcaatcccggaaatggaatcagaaagaagccgtgcaggctatggatgcgtttcttgacgtgaagaatccccaaggggtaaaaaattgtcccttattccaatctccggctgaaaccgcattgaaagatgataaaacgccgccgggcagtcccatgggcgggggagaaccgtaaaataggaatgtccttgagctgcgggcttggcgtggtcatttgctgataggctttccccagcgtggacatggggccagaatgggtacattccgcgcacagagttaagaggtacttccgcatgcactttccacgtaagcaggccattttcttccatgaagcgcaaatgcgcgcccgggttcatggaaggcgcccgtatccggagcgcgggaaagagctccctcctgttgaatgaataaaaacgcccctgccggacgaaccgtgcaggggcgttgaaattcagcggctgtacgctttattccgcgggtttgtcggcgcccatgttggcaatgctctggtacaggttccagcggtgccagacgtccttctgggcttcttcaaggagtttttcaaatccttccttgttggtcttcgccagaagcttgaagcggttttcgctgagaagcacgtcgcgaaggtcgcccttcggtcccttgccttccacgatcagcggattcttgccctggagggccaggtccggattgtagcggtagagcaggatgcggccggaatccacccatgccttctgctgctgcaggcccttggccatgttgatgccgtgggagatgcagtgggagtaggcgatgatgatggcggggccgtcataggcttccgcttccacaaaggctttcagcgtatgttcgtccttcgcgccgagggcgacggaagccacgtacacgttcccgtaggtcatggccatgaggcccaggtcctttttcacgccgggcttgccggtcgtggcgaacttggccacggcagcgcgcggggtggacttggagcactggccgccggtgttggagtacacttccgtatccatgaccagcaccttcacgttcctgccgctggccaggatgtggtccaagccgccgtagccgatgtcgtaggcccagccgtcgccgccgaggatccagacgctcttgcggacgagtttgtccgccatggtcaggaggcgtgcgcattccggcttgccggtgattctcttcttgagttcggcgacgttttcacgctgctgcgcgatgtccgcctcatccttctgcgggttggtcaggatctggtccaccagttcctggcccacgatgccggcggcttcatggaggagctcaatggcgtgttccatctgcttgtccagggagacgcggaagccaaggccgaattcggcgttgtcttcaaagagggagttggaccaggccggtccgcgtccttcggagtcatgggaccacggggtggtgggcaggttgccgccgtagatggaggagcagcccgtggcgttggcgaccaccaggcggttgccgaagagctgggagagcattttcacgtacggggtttcaccgcagccggcgcaggcgccggagaattcaaacagcgggcgcagcacctgcatggagcggatgttgtccgtccttaccttggtgcggtccacgtccggaaggctcatgaagaagtcccagttggcttcctccttgtcgtgaatcttcagggtgggcaccatggtcagggccttgtgggtggggtccgtcttgctcttggccgggcagacgtcggagcagagcgtgcagcccgtgcagtcgttcggggagacctggatgacgaatttttcacccttccagtccggatgcttggcatccaggcattcaaagccttccggcgcgccggagagggcgtccggagagaagaacttgctgcggatggcggcgtgcgggcaaacggccgtgcacttgccgcactggatgcagagggcgggatcccattccgggaggtccagggcaaggttgcgcttttcgtactgggaagtgccgttcgggaacgtgccgtccacgggcatctggctgacggggatgctgtccccttcgccgcacatcatcttgccgaggacgttctggacgtagtccggagcgtctgcggacatgacgggcggaatggcatggccggtgatggttttgccggtggtgtccacccggtgcaggttttccagcgtggcgtccacggcggcgatgttcttgtccaccacttcctgccccttcttggcgtaggtcttggcgatggctttcttgatgtagccgatggcttcatcagcgggaatcacgccggccagcttgaagaagcaggtctgcatgatcatgttgatgcggccgcccatgcccgttttccgggccacggagaaggcgtcaatcgtgtaaagcttgaggttcttgtccagaatctgctgctgcatgcgggcgggcagcgtgtcccacagcttgtccgcggggtgcgggctgttcatcaggaaggtggcgccgttggcggcgttcttcaggaagtcaaacaggttcagcagcgtgggctggtgcagcgccaggaagttcgccttggtgatcaggtacgtggacttgatcgggcgcgggccgaagcgcaggtgggagatagtggaggaaccggccttcttggagtcgtacacgaagtagccctgaacgtacaggtccgtgtgctggccgatgatcttgatggcgtccttgttggcgcccacggtaccgtcggaaccgaggccgaagaacatggcgcgcgtcacgtcgtccgcttccgtggagtaatcttcatcatacggaaggctggtgcccagcacgtcgtcgttgatgccgatggtgaagtggttcttgggagcgtcctgttccaggctgtcatagacgcccttgaccatggcgggagtgaattccttggaggagaggccgtagcggccgcctaccaccttgggcatgccgttggtgaaggggagcgcgccggagccttgggcgtcaaagagggcctggatgacgtcctggtggagcggttcgccctgggagccgggttccttggtgcggtccagcacggcgatcttcctgaccgtggcggggagcgccttgatcagttccgcggcggggaaggggcggaacaggcgcaccttgagcacgcccaccttggcgttttcacgggcgatcatggcttccaccgtttcttccacggcttccgcgccggaacccatcaggatgatcacgcgttcagcgtccggggcgccggagtagtccaccagatggtaggaacggcccgtgaggtccgcaaacctgtccatggccttctgcacgatggcgggggtggcttcatagaattggttgaccgtttcacggccctggaagtaaacgtccgggttctgggcggtgccgcgcagcacgggagcgtcaggcgtcagggcgcgttcgcggaaggagtccgcccattcctgcttgatcatgccgttgagcgtatcgtccgtgatatctgcaatcttgccgatttcatgggacgtgcggaagccgtcaaagaagttcatgaacggaacgcgggattccagcgtggcggcgtgggaaatggcggcaaagtccgcggcttcctgcgtggaggagccgcacagcatggcccagccgcaggagcgggcgctcatcacgtcgctgtggtcgccgaaaatggagaggccctggtaggccagggaacgggcggccacatggaacacggccggagtcagttcccctgcgatcttgaacatgttcgggatcatcagcaggaggccctgggatgcggtgaaggtagttgccatggctccggtctggagggcgccgtgaacggtgcctgccgcgccgccttcactctgcatttccaccacggagggaacggtgccccacaggttcttccggttgacagcggcccagctttcggctgattcacccatcggagaggacggtgtaatggggtaaatggcaatgacttcagaaaaacgataggctacggaggctacggcttcgttagcgtcaatcgtgctgtaagttacggttgtctgatcactcataagtctgcacggatagtatataattgataaataaggtgcgccttaacggagttatttataacatgtctgacgtcgaaggtaaaagcaattatgcgtatgtggggttttggcggctattttttaataataagaccagtttcttttcaattcctttgaatatcgtgccttgcgtggttctcccgctcctttttacagaggctgcggacgggcatccacccccgcgggtgcgtcccccggcgcttggactccggaaaggagggcaaaacggtccccggttccggacaggccgccaaaaatgccctctgcctgacaatgcactagccaaaacggaggcaagcctttaaaatccccgcactatgtccgaacaacagcaggcacatccgaatacgacggaatccgaacttattgccgtgcgccgcgacaagctcgccaaaatccgcgagctggggattgatccctacggcgcaagatttgacgtgaccaccacccccgccggattgaaagccgatttccaggaagacaaacaggtagccgtggccggccgcctgctggctattcgcgacatgggcaagtcccagtttttcgtcattggagacgtacgtggcaaaatccaggggttcctgcacaggaatgaagtggatgaaaccacctggaagctgtggaagctcctggaccgcggagactggatcggcattgaaggaaccaccttcctgacccgtaccggagaacccaccgtgaaggtctccggcctgaccattctttccaagagcctccggcccctgccggacaaatggcatggcctggcggacaaggaggtcacctaccgcaagcgccatctggacctcatttccaatgaggaaagcgcgtccctgttcgtcacgcgctccctcatgattgcggaaatccgccgctttctccaggaacgcggctatctggaagtggaaacccccatgcttcaggacgtggccgggggcgccgccgccaagccgtttgaaacgtaccataacgcgctggacatgccgctgacgctgcgcattgctccggaactcttcctcaagcgactgatggtaggcggcttcgccaagatttttgaactcaaccgcagcttccgcaatgaaggcatcgaccgccgccacaatccggaattcacgatgctggaagcctactgcgcctgcggcgattttgaaaccatggcgaacatggtggaggaactcatctgccatctggcggaaaaattctgcggaggcctccagattgaccacaaggacgcggaaggcaacgtgctttacacgatcgacctcagccgcccctggaagcgcgccgactaccaggacctgatccgcagcgtggccgggcaggactggtttgacatttctcccgaggcgcgccgcgcccgctgtgaggagctggacgtggaaatcagcccggacatgaaggatgtggacgtttcccagcaggtttatgaaaagctggtggaggaaaaaaccatgaacccctgcttcgtcacccatgtggccaaggacctggttcccctcgccaagctgaacaaagaaaacccggacgtggtggacgtgtatgaactggtgatcaacgggcaggaaatctcacccggctattcggagctgaacgacccggacgtgcagaaggaacgcctggaacaccaggccgccggggaaacccagcgcgtggactacgacttcattgaaacgctggaatacggcatgccctccgcaggcggcatcggcatcggcattgaccgcgtcatcatgatgctgacgggcgcctcttccatccgcgacgtcctgctcttcccgcaactgaaacggaaggacagttaattcagcccaccagccccatggccccccccaccccggataccctggactgcgcttccgcccaatggatcggcaaacgccgtgagcaggaagacgtggttaaaagccttcccgccgccggcgggatgctgggcatcgtgtgcgacggcatggggggccatctccgcggagactgcgcctcctgcgtggtggcgcaggaatttgccgcagtatttgcggaaagcggcgtggaggatattccggagcgtttgacggaagcgctgcatgccgccaaccgggcgctggccgccatccagaaggagccggaggaatccggaaccacgctgctggccgtcttcatccgcggccactccctgtggtggatcagcgtgggggattcccccctgtacttatggagcggagcggacagcttccgcatggaccgcctgaatgaagaccactccatgaggcccattgcggattgcctctacaggaagggggaaatgtccctccagggcgctctgcgccagcgctgcgttctgcggtccgccgtcatggggggtcccatggaactggtggacatcagcgccatgcccctgcttctgcatccgggggatgcggtgctggcctgctcggacggcttgcaggtctggagcgaactgctgagggagccttctttcctggctctccaaaaggccagggactgttccagccgggagctggtgggaaccatcatggagcaggtgaaggacatgctggaaccgcagcaggacaatgcctccgtctgggccgccgtgatgcggaaaccctgcacggacggtaaataaacccgttccggcaaaggaaaaataagaccgggggcatgttccccacgagcacggggcgagcctgtgccgtttttactgcgtcgctttttaaaagagggcctttcctccggacgggggcggtgcaggaagccttctggaaatccggtgccgggaaaggccgttgaacgttccgctgttccgcgggagcaggccgccggaaagaagcgtcccggagacgatttccccattgtcatttgacgggcgggggggtagaatactctccgcacgacatgattgcctggatagttctctatattgcagcctcctacctggttggagcggttccgttcggctacgttgccggcaggatcaggggccttgacttgaggcgggagggttcctgcaacataggcgctaccaatgcatggcgcgtgctgggctggaagtggggcctctccgtttttgcgctggattttttaaaggggttcgtgcccgtgttcggcgccctgaactggctgccgttcctgacgggggatgcgggcggctgggacttcaacgccgtagtcgtcctcgtctgtttcgccgtggtgctcggccatacctatacctgtttccttgggttcaggggcggaaagggcgtggcgacgactgcgggcgtcttgtttgccctcaatccggtggtggcctgcgtggccctgggcgcgtggctggtattcatgggaatctccggcatcgtgtcgctggccagcctggtggctgccgtggcgatgatcgccgccggatggtggttctacccgctttgccagggcgggaccgtttctccccagatactttacattgcctttttcacggtggtgggggctctggtcattctcaagcaccgttccaacatcgtgaggctcctcaacggaacggaacactccttctactccaaaaagtccaagtaagatgatgaatcggttacataaaatagcagtcatcggcgccggttcctggggtacggccctctccatggtcctggcgacccgggaatgtgaagtcgtcctgtggacgccggaagaagcgcaggcccggcagcttgctgaaaccaggcgcagcccggtcctgtcggaaaccgccgcgcccctggcccccaacatccatcccacttgcgacctggaccaggtgaaggacgcggagctcatcgtggtggtggtgccttccgtagccatgcgttccgtagcgcagcggctgcgcggcctgccggtgaggccggacgccgtcatcgtctcctgcaccaagggcattgaacagggctcccataaaagaatgacggaaatccttcaggaatacctgccctccaatcccataggcgtgctctccggccccaaccatgcggaagacatctgcctgggcctcccgtccgcctccctgatcgggtttgaggatccgaaatatgcggactgggtgcagcagatattcgcctccaagaccttccgcgtttattccgctacggacatcatcggcatgcagctggggggaaccatcaagaacgtctttgccatcggggccggactgtgcgaggggctgaacctgggagataacgcccaggccgccctgctgacccgcggcctggcggaaatgacgcgcatcggcgtagccagcggaggccgcagggaaaccttcatgggcctttccggcgtgggcgatctcatcgtcacctgctattcccgccactcccgcaaccagacggtggggcggaggctggcggaaggaaaaagcctccaggaaattctggacgccctgggcatggtggcggaaggggtgcccaacacgctctccgtctatgaaattgcgcggaagctgggagtgaggacgccgctgattgacgccgtctattccgttctttatgaatccaagccgcccatggaagcgcttgtggagctcatgacgcgggacccccgtccggaattagattgattttttgtttttttgagttgctttccctcgacaaattatactatataaacaatcagtatgaaacgtgccatcatctcagctctttttgccgccggcgccatcggtgtcgccagtgcggacattcaggctccacccgcttccgaatacacccccacccgcaagctgggccgcgccatcgccaacatcatttactccgttgaagaaattcccctgggaatcatcaactggacgagccgcgaaggtgactatgccggtttttccgtgggcattgttgatggcaccaccaccatgcttgaacgcatgggctacggcatctatgaacttgtcacgttctgggctcccacctacaagtgcacgtacaagcccccctatcagggacgttgcggcatgagcggccttaaggaatacaatcccaacggcggcctgagcgaattccctgcggaactcagcttccagagctactacaagtactcccgccagcagcgcgactaaggtcactgttaaaaatttcaaaagggctgtctgtaatgaagcagacagccctttttatatggtgcggttgagtggtcttgacaatagccgccattgacgggaaaaaggggaaaacgtattcttccgtaccggaaagactttcccatcatgaataaaacagttgctttcatcggcctgggcgctgccgtctgcatgacggcccccgcatttgcccaggacacccatctttccctgaccaaggagagcgttgccagcatgcatgaaattacggcggcgctggacaaggtgacggacgagcccggagcggcggacgccgtgaaaacggtcaaaaaggtgcgtgaaaagctggtggacctcggaaaaaggcagcttgaacttcccggcgccacgccgcaggagcaggcgcagatttccgcccagatgacggaagtgcagaaaatttccggtgaattggtgaaatcccttgcgcgcttgaaaaaggaaggtctgctcacgcccgatttgcagaaggccctgatggatttgcagtccgtgcagacggaactggcgcaggcttcccgggacaaggccgcgcaggcggagccgttcccgaaggatgcggagggcaacacgcatgaaaccctgctggcaaaaaccgtggatgaagtcaaaaacctggatgaatccctgtccagggtgaaggatgaggaaaccagcaaggccgctgtggaccagatagggcattaccgggccgccctgctggacatcgccaagaaacaggccgccctgccgcccctcacccgcaaccagcaggccaagctgacgggagtgcagcagcagcttgtggaaatgatgcagcccatcgtcaagcatgtgacggccatcatgctctctccggatgcctccaggaatttgaaggaggccctcaattccctttccgaactgcccaaggaagttcagaaaatccgtgaagaggcggccaagtgaactttttgggggaatgcccctcttttggactggtcaaaaattataattgttctaaagtggctgtcctgaggaatgcgaccgatttttagtgaaacagatctcaatgaacgccccttcctggttttctgggaagtgacgcgcgcctgcgcgctggcgtgcaagcattgccgcgccgtagcccagccgcggccccatcctgatgaactgacccatgaggaagccctgcgcctgattgaccaattggcggagctgcgtccccccatgctggtgctgacgggcggtgatcctgtcatgaggccggatattctggaattgatccgcgcggccgccggcaaggggctgcacgtagcgttgagccccgccgctacagcccggctgctgcatgcggacttccacgccttgaaagaggccggggttcaaagcatgtccctgagcctggacggggcgcatgaggccacccatgacgccttccgcggcgttccccacacgtatgaacggaccctgcgcgcggcggaaatggcgaaggaagcggggatacacctgcaaatcaacaccaccatcaccaagagcaccctgggcgagtttgacgactttgtggagctgatgaagaagatgcagccgggcatgtggagcgtgttcctgctggtgcctacgggccgggccgccatggatgaaatgcccacggcggaagaagtggaggccgtctgggaaaaactcagcaaggtaagccgggaagtccccttcggcgtcaagaccacggaagggcaccattaccgccgcgtggcgcttcaggaagcccgcgcgcaggggagcaagcccgcgcgccgcgccgttcccactcgggacggcaagggcatcatgttcatctcccataccggggaaatccagccttccggattcctgcccgttacggcgggaaacgtgcggacggatgatccgggggaaatctaccgcacgcacccccttttcctcaaactccgggatgacaatgcactggaaggcaaatgcggccggtgcgagtaccgcaccgtctgcggcggctcccgttcccgcgcctatgccgtttacggagacatgatggcggaagacaacctctgcccctaccagcccaggctttcacaacaccatgattaacattaccagactttggacaggggcggaacagcccgcggaccatttgagatacgggcagggccacgggcacggccgctccgcgggaggcgccgtggaatcctgcgctccggcttcgtcccgcgtccgcaagcccattgtggtctggaacatcacgcgcacctgcaacctcaagtgcgtgcattgctatgcggacgcctccgcccggaaatttgaaggggagctggattgggaccagtgctgcgcggtcattgacgatctggcggactacaaggtgaacgccctgctgttctccggcggggagccgctggtgcatccgcgcttcatggagctgctggaacgggccactggaaaagggctgaaagtgaccatttccacgaacggcacccgcatcacgccggaggccgccgcgcggttcaaggaactgggcgtggcgtacgtgggcatttccctggacggcatcggcgccgttcatgacaagttccgcggagtggaaggctcctttgaacaggcggtgcgcgggttcaagctctgcagtgaagtggggcagaagacgggcctgcgcctgacgctgacccgcaacaacgtgcagtgcatggaccagattctggacttcattgacgccaatgacatccagcgcgtctgcttctaccatctggtgcccacgggccgcggcgtggaagtgcagacgttgacgcaggaggaagcgcggaacgccatggatacgctgattgcccgcgtggaggaatggaaggcggacggcaaaaaccgtgaagtgctgaccgtcacccagccagcggacggcatttacctgctgctgcgccagctccgggaaggctccccgctggcgaaggaaaccctgaaccttcttcaatggaacggcggcggagcgaacagctccggccgcggcatcgccaacattgacacgcagggcgtggtgcacccggaccagttctggcaatccgtcacgctgggcaatgtgaagaacaacctgttttccgatctgtgggacgccaaggcgggggccgcggcggagatgctgcctgagttgcgcgggtccgacaatcccctggaacggcagaaaaaaattgaaggccgctgcggccgctgcgtgcactttgccctgtgcggcggcggcttccgcacgcgcgccgcgtttgccaacgggcactggtacgggtccgaccccggctgctacctgacggaagaggaaatttccacccctctgccggaaatcaggtaaaatccgcaggctgttcccttctccggaagaagctccaaatacggtggcatattcctcaggccgtctttgggaacaagagcctcccggcacttgaacgcggctgattgtaaccgcgaaggcggggaggcagggagcggctggaaatgcctcctttccctgctttacaagggaggcggcatggcatagcatccctgcatcatgagtcaggaattgagaccggaaaccctgtgcgtgcaggcgggctggacccccagaaagggtgaaccccgcgtattgcccatttaccagagcaccacgttcaagtatgaaaccagcgaacaaatggccaaactgttcgatctggaggaagccggattcttctatacgcgcctccagaaccccaccaatgaggcggttgccagaaaaatcgccgaactggaaggcggcgtggccgccattctgacctcttccgggcaggcggcctccttctttgccgtcttcaacatctgcgaggcgggggaccacatcgtcagcaccgcgtccatttacggaggcacgtacaacctttttgccgtcacgttccggaaaatgggcattgaggtcacctttgtggaccaggacgccccggcggaggaaatcgccaaagccttccgtcccaatacgaaggccctctttgcggaaaccatctccaaccccacgctttgcgtgctggacatccgcaaaatggcggacatcgcccatgcgcacggcgtccccctgatcgtggacaacaccttcgccacccccatcaactgccgcccctttgaatggggggcggatatcgtcacccactccaccaccaagtacatggacggccatgccgcggcggtgggcggcgtgattgtggacagcggcaactttgactgggaagcccacagggacaaattcccggggctgacggagccggacccttcctatcacgggctttcctacagcaagagcttcggcaagggcgcctacatcaccaaggcgaccgtccagctcatgcgcgacctgggttccattcaatccccgcagaatgccttcctgctcaacctgggcctggaaaccctccacctgcgcgtgccgcggcactgtgaaaacgcgcaaaaggtggcggaattcctgcaagggcaggaggatgtggcctggatcaactatccgggcctgccgtccaacaaataccatgacctggcgcggaagcaattccgcaacgggcaatcctgcggcgtggtgaccttcggcatcaagggcggccgtgaacgcgccatcaagttcatggacagcctgaaactggccgccatcgtaacccatgtggcggattcccgcacctgcgtcctccatcccgccagccatacgcaccgccagttgacggatgagcagctcatggaggcgggcgtccggccggacctcatccggttctccgtgggaacggaagccgcggaagacatcattgcggacctcaagcaggctctggaagccatccgttaaaccggtctttcctttctcgtgcgaacagccgttccgcgcatgtccgcggagcggctgttctgcgtgggtgacgggtgaaaaagccgggatggcccggcgtattgaacgtttccggaaaagagcgccggcagacgggagggcgaggcatatgctcccgctggggaaagaccgtttccggcagcaggggcctcccggctcctgtaaaaacctgcggaaactccgcagaaaaataacttcatttcatgttctccttattccaaattttaattccacgtaaaacaggtattttaatagggttataaagaaaaatccagcaacggcgaattacggggaacggctcggccattcaacctcaagaagatgcgccggatttcagaaaaatctgaaaattcaaagacttttcttcttaaatgtaaattgacacaccataataaatttattatggtgtgtaacttatgaaaaatagatattgtgctgtattaataagttgcgccagtgtgctggctgcaaatgctgctaccatcattgccgaactgcccgaatcagccaatttgtcgcaaaccgcgaccatggcgccgcaaacgggaaaccagctgctggataaagtaaaaggccgtgaatttggcgtctatgcgggaggcaataacaacagcctggccaactggccccagaacggggagggaacctgggtcaaccatgatgacgtcggttccatcatcctgtgcggcagaagcggcgtggccggagactcctttgccatggtgctgggcggcccccggcagggagagcttgtttcctccatcatcttttcctgtgacacgcccacctccgtcatcacgagctacgccatggtgctggcggtttacgactccgccggaacgttggtccggaacctttccaccgtggaaagctttacctttgattccacttcaagaacgacgaccgtttccctggacatggcggattctcccctggcgtggggggaaggatacaagctggttgccggagtgcgcggcggcgcgggcggcgccacctccccctatacgcttgccaacatccaggtatcctatgaaaccgttccggaaccggctaccgcatctctgggaatgcttggcctgggagctctcgtcttccggcgttcccggaaccggtgagcggtaaacttttcaatcgggaaggaggcggcctgaaaaacgcctcctttcctttttccgttcggaaaaggcacgcttggcatggcgtaacgcggcattccggaatggttcattcccggagagaatgttcaaaggcccggtgctgcacggcctcatacaaatgggaatcctgaatatcagggctgccctccagatccgctatggtgcgggccaccttcagaatgcggtcgtaggctctggcggaaagggccagttcttccacggcgcggagcaggatggcgcggctttccggcagcaggcggcaatgcctctggagcgcttttccggaaagtgccgcattgctgcggaagggagtgcccgcatatctgctgcactggagctgccgggcggccatcacgcgttccctgatgccggcggaacattccccggcgggtgcggaggccagaatagaggggtccacggcgggaacttccatcagcaggtcgaaccggtccagaagcggtcctgaaatcttgcggcggtagcgtgcgacctgcgccgggggacaggtgcaggttctcctcctgtcgcccagatagccgcaggggcacggattcatggcggctgccagcatgaagcggcacggaaacgtcatggtgccggaagcgcgggaaatgaccacttggccggattccagcggttgccgcagggtttccagcgcggcgcggcggaactccggcaattcgtccagaaagagcacgccgttgtgggccagggacacttcccccggcgtgatattcgctcctccgcccatcagcccggcatcggaaatggtatggtgcggagcccggaacggacgccgggccaccaggccgttcccccgtttcagcagtccgcatacggaatggattttactggtttccagagcttcctccggagtcagcggcggtagaatggtcgggagcctctgcgccagcatggacttgcccgaacccggagaaccgcaaagaaggatgttatggccgcctgccgccgcaatctccatggcgcggcgcgcatagggctgccccttgatctcgtcgaagtcaacggcagcttccttgtcttcggcctcccggtcctctcttccggaagccgtgaagggagggggcagaacggaggaggtaaggagtgcccacgcctccttcagagaagccacggggtaaatctccacgccctgcacgggcgttccttcgtgtgcgttagcacgtggcagcatgatgcgcttcctgcccatgcgccgcgcctccataatctgcggcagaatgccctgcacggggcgtacggcgccatccagggccaattcccccacgatgcaccaggaagaagcgtccatgtccctttccgccgctccggcgaccattcccagggcgatggggaggtcaaaccccggtccctgcttccttaaatccgccggagccagattgacgacgaaaacgccctgctggaagggcagtccgctgttctggatggccgtatccacgcgctgcccgctctccttcacggccgcatcaggcagccccacgataaaggtgcgtttttccgccatggggcgaaaatccacttccacctccacttctacgccatccacgcccagaacggtggaggaatacagccgcgtcatcattcctccatgctaggaggaaataatgaaaaagaaagaaaaataacaaaaatgcggggaatatctaacaaataattcaacggcgggaggcgcgccggagaacttcccgttcctcttccgtcaggctggacaggccggagcgggatattttttccatgatttcatccacctcctcttcggagggatggttaccggcggggcggcgtgcggagtgcgaggtggaatggtgggaggaagaaacgacccgccgcctgggagaggacagtttttccttccacaggatcagcaatgtcaggatgaacccggcgaacatgccgcccaggtgtccggcttccccgcccgcgttgttccactggaaaataatgacggcgcaggcgatgccgaggacggccagggcgaactggcgcacgctcaaattgaccggagggaacagaagctgcacccgggcgcgcgggaaaagcactgcgcacgcggccatgatgccgtaaatggagccggaggcccccaccatgggaatgaagcgccattccggatcaaagaaccccatgtaccccagcagggaggagaacagggccgctgccacgccgcaaaagagataatacagcaggaagcgcagatggccgaagcgttcctccacgaccggcccgaaaaaccacagggcgatcatgttgaacatgatgtgccccagattggcgtgcaggaactggtaggtaaacaaccgccacagttccccttcatgaaagcacgtgtattcactgtaggccccgtaaagctggatcaggtccagacggcccggcgggtaaatatcccgtggaatatccacctggaagaaaaacccgaggataaagacgaccacattgagcaggatcagccagtgcaccatcacggcgccgcgctggtcaaacaaatgctcccgtaccgtatctccccagttctcgttctccgctcgcatataaggccgcatgtaatcgtgttcagggcgttttgacaaggaaaatagctgtcccgttcaaggaagtacgggaaccgcgccgcattatttccacagcgcggcgggaagcaggtccggcggcagttccgccccgtgcacaagatgttccgccagctgggccgcggcccacggggaagtggtcactcccttgctgcccagtccggagaagacgaactggccgttcaggccgggaatgggcccggcgacgggctggctgcgccggatgatggggcgcacggcggctcgggcgcggaggaagcccgtctccccggaatagcgtttgacgaggtccagcatcaattcctggacggcgggggcttccggaatgccgggagcgtcccacgcccacgcgtaagtggcgccgaagcgccagaaagaaccgttgtgaaccagccagtggccgaagtgcaggatgccggcgtgccagtccagctccttcaggtctaggtccagaatagtgcccttggaagggcgtcccttcaagggagtcatgtccgggtggcatccggactcccagccggtgcaccagaccacgtgggaaaactcctgcccgttccaatggaaaaggccgttttcatccggacggatatccgcgggggacacgtccgcttccacaaaacggccctgttccgtgaaaaacttccgcatggcgttgaccatgtcctccacgtgcagcacggcggagccgcgcgtataggcggcttttccgcggccttcccagtgttcaggccatgggaaaagggggcccgcataggcgcaggactccggggccgtctggcgttcctgccagatttccagttggtcctccgtttccagttcccggaaaataggggtcttctgccaccaggagccgcccagttcccgttccgtctccggataaaaggcctccgctgcggacaggcattcctcctgccgccagccggggcggaaggcccggcccgtcaggggattcaccaatccggccgccacccgggaggccgtttccgcgatggggcggtccgcaatcgtgaaatccgcgccgcggcgtttcaactcccacgccaggcagctgccggcgattccctggccaatgataagaacgttcatgataggtggatgaagaaccggagaaatccggaagtgaggaaaaaacagaggaacagtccagccttcctccggaaggaaaaatgccccgcaggggatggaagcgcctgcggagccggaaaaacggcccttttacagggctgcgatgatggcatcccccatttccgccgtattcacgcggatttctccgggagcgcccgtagccaggtcgcccgtgcggcagccctggtcaatcacgcggcggacggcggcgtcaatggcgtctgccgcggccttttctcccagggagtagcgcagcagcatggagagggaaagaatctgggcgatcgggttcgcaatgcccttgccggcaatgtccggggcggaaccgccggagggctcgtaaaggccgaagaacaggccgttgtcctgtgcgccctggcacaggctggcgctgggcagcatgcccagggagccgcaaatcatggccatttcatcggaaagaatatctccgaacaggttctccgtcaccagcacgtcaaactggcggggattgcgcaccagctgcatggcggcattgtccacgtacatgtggagcagttccacgtccggataatccctggaaacctcaatcatcgtctcgcgccacagcagggaattggtcagcacgttggccttgtccacgctggtgacgcgcttgcggcgcccccgcgcggcctcgaacgccactttggcgatgcgcaccatctcgctcttgtggtagcgcatggtatccacgacgacttcgtcgtccccctcctgttcgcggaaacggggctggccgaagtacaggccgccggtcagttcccggacgcataaaatgtcaaaaccgccttcgatcaattcactcttgatgggagaggcgtgggtcagggcaggcaggcatacgcccgggcgcaggttggcgtacaggccgaaatgctttctcagcggcagcagggcgccgcgctccggctgttcattggcgggaaggtgctcccacttgggaccgcctacggagccgaacaggacggcgtccgcctcttcacaggcgcggatggtctcttctggaagggccttgccgcaatggtcgatgcccgcgccgcccacaaaagcctccttgcggctcacggtaaatccaaacttggcgcttacggcgtccagaactttcagggcctccgccatgacctcgggcccgatgccgtcgccggccagaacagcaatatgatggtgatgttcactcatgtcgctgaaagtctgggcattctcccctcaaaggtcaagaaacaccgttggcatgcccacgccgcggaagcctttttgcgtcaaaaagcctacagaaacaaaaaagtacttgccaaacgcctgtgcctccagtaaaaatccctccgcgctccatggaacgcaaactcccctgtagctcagcggtagagcgggtgactgttaatcactaggtcgttggttcgagcccaaccgggggagccattataaggccctgaaactgaaaggtttcagggcctttcttgtgtctggggttgagaggggcaggtggccggaaatgatcggaatagtaaggaaaatgaggtttttttgtccgcaatttgtccgcaagatttttatgttgaaactattttaggataaatgatttgtataaattctgatcagaatgtaaaagtacgctgaaaaagaagaagtctgggacgctcaaaacggatgatcaaagagctttgagagtttttgcacaaggaagatagggggggcggcgggaggatggcgtgttttttggggggaatggttccatcggagagtggggattgcggacaacttttgtccgcaacctgtaagaaaggggatgtgggagggcttgatggatgtttttacctgttcttcctgaaaataaaacgggagggccggaacggtgtccagttctcccggagacgggaggggagtgaaaaagaagaatagaatgccacgacggtacggagagtacgctggacgcgggtgtgttatcggcgtatttggcgccggatggggagcattgtttagtaaacgggaagcaggggtaaattcgacacatttcgaatttctctttcgatcaccgcacagccaatcgttatatgtgctgctgccaggaagcggcggcgtgactgggggaagacgaacgacccgtgctgtgcagggacatggacggtgaaaccgtggcagccctgtcggatgcggagtttcggtgatgaggggaaaagcagaaagagttcgagagatgttattttgagtgcaggaacggtacgcaggcgtaccggaagagttacgggaagaacaagagcctgaagggctcgacatgcaaggaggatgcctcaaagctcctaacaaatcctaaggtgaaagagcatctggagaagctgaacgggagggcgtgtgtccagaatttggctgtgaatttctaatagaaggaagagatcaataacagttggaatttagttcttgagttgacacaataagtaggtatctttgtgtcaggagaaatcgttttttgtgagtacaaatatagaaaatagaatgatttacagaattaggggtatgggaagaggttctgtattctcaccgcttgatttctatgatcttggctcgcgtgatgcggtggcgtcggcgctgaagcgcctcaaacagggtgggtcgattcgccatttggctcgcgcgctttacgattttcccaaggaggatgaggtgttgggagctttggaccccgagttggaggttgtgatcaaggccttggaaaggcgggagaatatgaatatttatccttccgaggcctatgctgcatacgggctggggttgacggaacaggttccgatgagtcctgtttttgttgctcttcgtccgatgacggttcaatgtggggcgagaacgattaaaatccggaaagctcccgtgaagattctagctattaaaagccgcgtgagtatgtctgtgactcaagcgttgaaatggataggccctcagcgggtgaacgatgaccggatttcgcatttgagccttgttttgacggaaattcagaaagcacagctcctgaaagatattcgttatatgcccctcaatcagcacgatgtgatcagacgaatcgccaacgtatccagataatcatgctctcttttctctctttgcctttgcagcgtcaacgggccgtttatgaacagggcgcagccagacttggaattttgcccgaaagcatggaaaaggatttctgggtgagtctgattttgaagaccatattcagtcatccctcgttgggagaggtcatgacgtttaagggtgggacttctctgtcaaaaggctggcatttgatcaagcgcttttcggaagatattgatctggtgatcgacaaaggcgtgttggaagggctcaatcctgaagattacgataacgaaggaaaaagtccttcgcgaagcaaaatcaagaagctttcggagactggacgaaactgggttcaggaagtgttcttctccaaattggagcagcttcttgttcctttgttggccggaagggaatggtctcttgcggttgatcctgatgtggaagacggcatgtgtcttttgtttttctatccgtcggtttggaaaagctccaaggatcattcctatatcagaaggtgcgtcaagattgagatgggaccgcaacctgataattggccccatgtgtctgtgctcatagcaccgatgatttttgaggagtttccgaagttggcctctgaagaagctttccctgtgcgaacgatcgaagcacaccgtaccctttgggaaaaggccctccttcttcatgagattggcaaccgagccgataatccagcgcatgcgcacaagatgcctcgcatgaggttatcccgacattattatgatttgtattgtctcctccgttctcccttcagaagcaaggctcttgaagacaggagtttgttcgagtctatcgtcaggcacagaaaaacatttttcaaggtaaccggagtggactattcaagcatgactcccggtcggttgaatctcatgccccatccttcgcatatggcaatttgggttcatgattacgagcaaatgaaggagacgatgttctacgatccccggttgccttcgtttgcagagcttcttgaaacggtcaaacaattccagaacgatttcaacaagatgtgagcagtctgaaggggcggcagttgtatgaaagtggatataggtttttccgacattgttttgcagaacctcctctttatacattttcccatggctttgagtagggggaaagaaggtgagggagaataggggcggcagtcaaaaacagtggggaaggggacgggaaaacggccgttcgggataaaataaaaagggagaaccggctcttggaccggttctcccgaagcagggaagttttgaaattcccgttgtgggggcgcgttgttggcgtttatcggcgtatttggcgctggatggtgtaccaggcttccacttctgtcaggcggaagcgtttgtttctgcttcccactacgaaaaagggcagtccttttttgatttcccggtcaagggtgacggtggaaatgacgaggtagtctgccagttcttctcttgtcatgacgggtttgagcttgcctggagttttttcgtaggaatggggttcgccggtacttggttcccggcccgtttcacatggggtttcgtacatggttctgatttgttgcaaggctttggcggttgtaatcaccgcgtttttgcctttgttcgatcagtgtatagctgattttttgaaaaggggggagtgctcataacatgagagaaaggtatcatgttatgagtagtgagttggctgggtgataagttttgacgatgtggaaaaggtgttggtggggcggttcatggcactggaggctttttgctgcattctcatgtgcttttcctgctctttaggattcttttcccgagggggatattaaacggaggtgccattttgttgaggcagggttatttatggtagagtggcctattcatactatgagcacttcctttttttgaggaatgtgtgagagaatgattttgtgacgagaaaaattccgttttgcgctacggtgaaacaagaggggaatttttctgtattacatttaatgaacaaggaataattcgtatgacggcaatcagtatttcaagaacccctaccgtgttctttttcgaagtgcggggagggaaaatcggccttcggggtgaatgttttttcaatgaaaacgtgaaggaatttgaagatttttttcataaaaagagagagaaaacgagaggtgaaatcatgttggttccgtgggtgaaaccgggagcgatccggtttgataagacggctgtggtgaggagggtggatgtgtttgaaatgcatgatgtcggcatcattgccagtaagccggttcgtctgtgtgcgtggtgggagcggttgctgtcggcaggtgatcggggggatgtttcggtggtgtttatggagcgttccttgttttccggttgtttttcaaagtgtttatattcagcagaatgtgtggtgtttaagaggggcgtgatggggctttctcattttttcggattcaatgctgcggtgggagagacagggatgaaaattgcagggggattggagaagttttgcatggtcagggtgcaacaaaacaaggatgaaaagggcaacaattgtgcaacggatgttatgaaaagtacggtgttttgtgtgaaatgtgttacaggaaatgttgcggaaatggcgcaacatttaccgcaacgaaaaccgcaaccagagggagagttagaatttaatagtaataaagggggtggaggggaaattccacggtgtatgaggggttctccgttttgggaggatttcttttcctcccctccccctattttttctgaaagggtgaagtccgcatggggagggctgttgccggagttcgtggtccggggcgacgagatggtgtatggcctgggcaggggggtgttgtcccggaggacgctgtctgttgttgtcgaatcctttcctggaccgcaattgtcggcgggaaaggctgggacgaacggggtggcacacgctggaacggctgtgcgtgtcccggacgcccgtgtcggggaaagaggggaatggcgtgttggtgtaagtgggacggaggatgttgaaggatcgatttgtgggaagggattttcctgttacaccttgcggagtggctttcatcggaggcctgtggctgtggggaatttttggcaggaatgccgggaaccggttcttcattcgggatgtagcaggagcggagggattgtacaggttctgatggatgggagggggcgatgaaggagcggggattgacggaaaaacagcggagtttcgcacgcttttatgttgaagggttctcgcagagggaggcttaccggaaggcgtatggctgcaaggatagcaagatttctacgtgtgatgtcaacgcgtcccgattactaagaaatgctaaggtgattgagtatgtggcggagttgcgggaaaaggcggagtctgcggcggttttgaaccggaggaagcggatgatttacctttcccgtgttgtaacgacggcgcccgacgatgtggacggtaattccgatttgtgtcaggagctggtgataggcgagtttggtatcaggtgccggatgccggacaagttgagagctattcaggagctcaacaggatggacggagcctacgcaccggaagaggtaaaggtggagtcggagctgagcttcggagcgttgctgaaggggctgaagagcacaccgctggttcagccgcaagagggcggaaaagggcaagtgagggaaggaaggggtgatggaagcgtgtagtctgtttttccggggaaaggagaagagaaggggggattattccctgcttgaaccggagtttgatgcgatatagaattaaaaggaggggatgaactgacgctggtctgggatgagctctttttccaggggcggagttggaattggagaagatgccttgatcacgctctctgtgggagctggggccgatgatggagaattgcgcgccggaaacgcgggctgtcgacatgaagagtgctgattctgcctctgtgattttgtgcaagatacttatcgtcagtctgtcggactctcccaaatggagacgatggcgcaacgcctcggcggccagggattatcgttggagtgggtggacgacgtccggatagggaggatggaagatatgggtcccgaagagtacaggggactggaagcctattgcgtctccggttccggatgcaatacatccccaaacccgatatcaaccttcagcttcacggggatttctcccaggcgggctatcaactccacccgcactcccacgccccttcaccagcttttcacatttcaactccttgagcaacgacccgaaactcaactccatcatcacctggatcttctccggcgcataaaccccatccatccaattaagaacctgccccttaatgtttttaacagtcgacttgccatcacaccgcaaggcgcatccgtcagcttcctctccgggaaagccttcctctggctcatttcctcaaaaatgtaccgggtaaatgcctgctatttctctgtcaaacccttctccgacattacacaaaccgctgcttacagtttgaacaaatcctccacatcacccgcatgaggcacaatgcgaaaccagttaatatccccccatctcaaatgcctcaaaatcctccgaattgtctgcattccctgtgccgtcacatgaaaatgcctcggcagagaccggtaagccttcctcttcggcttctcccggatgaaagccagatcgcccacatccaccagataatttagaattcggcctacattctgcaagctgatccccgtctggctcacaattccgcacgatgtaatggacggattgcgcgcaatcgtcgtcagcactgccacttgagaggccatcagtctctcctcggtaaaacagcacgccacaacattcagcatatccacaggattcatgtccttgtggaacttattcattttctcgttcataaatcaaaatctcctttcatgatcttttccttttcctccttcgacagaggagaatcctttgcccgagcacgcaaagcctcaatctctgcgatcagctcctccggcgaataccggaattgcctagccagcttccttgccgtcaccaggccgtccttctccgacttcggtaccgacgcattcggagacaaagccttcgccccatagggcaaagtcaccgtgagcctctcacaacaattcgcatcaaaattcatcatcaaatcctctccttcctgccatttcatctttcacgacaaagtaaccaaatgagcttccagatatgcattcagcgactttctctccacttggtaccttctgggacagcgcatagcctggcttccatttttaaacggcagcctcatcgttttaatcggttcccccttccactctgcatccctcaaaattttttctcaaagactcctgggaaaacccgtaaatcctttctatatccactggagatacccattccatccacagagaatttttccccatgcccctctggcataccgcaaaattccgataaataacgcaccagagaccgtcgttccacccgcacaaacggcctttgtcgctccaatatcggatgcccacggaaatccaaaaccgccactcgcaccggcatcccttgcttttgcgcgtccagcaaaatcgctgtaattgccttgcgggaaaaacggaatacctcctgaatatccctcagcgaataccactccctctccattgataaaggcaaactcctacccataacggttcacggttcagttataaaatgtgcctgcaaataaacctctattgacttcctcgaaatacggataaacggacgtcttcggtccgactttgatccatttttaaaagccatctcgcttacctccagaggaatgcccttctttttggcatcatggcggattagttcgagagttttccgagacaaaccgtaaatctcctcaatatcgcggggactataccattcccgtttttccgacagggaaagccttctgctcacgggagtttttggaaacgagggaggggaaacaaattgagaattttgaattattttttgagcatttgaaaaacacgatttttgaatgtaattttgtaggagataacgtgccagaattcccattaaatgttcatcaatatgcacgcaaatttccttatttcgaacaccttgttcgctgtcatgactgtaagaatttgaagtcataacgcctattcttcaccctccttgcgccagtcgtcaatagctcctgattattatcgtttttagacgcataaaatcttgaaaaacatataagcaaatgctaaattcattataaaaaatgaattaccagatcacacccaaaaccctcaaacaatggctcaaggaaaacaatattagccggatgcagctggccgatatgctcatggtttccaagaacaccatagacggctggtgttcagggcgccccatcggtcttcgaaggaaggaatcccttcgcctcctcatgatggagaatgaactcataaaaaaaacggcagcctcttcctccaaaaatgaaagcttcaaaatcacttcctcctttttcacccgtgaacaatggaagtgcatttgcgtggctgccaagatcaaacacatgaccccggcggcattcctcaaaataagcatctttcaatcctgcaaaataatcatgagagaacagcaaagcgaataacacgcccgtttttgcacctctactccataagcatcacctttctcgcgcctgcagagctattcttgccccgccatggacaggataatcctcttcgtacaaatcctccatatcctcggcgatcgtggcctggatgtaggtcaaagcgacttgcatgaagtattcgagtccctgctgccgggcgttgacgatggcctgggagatacgcccgaggtactggacgttgaggatttcgatttcaaagttttccgagttgcccatgtcgaggatgatgagttccgccgatatgtcgtctaccgggaatttaccctggcgaagagaatggaaaaggtgcggggcatgaggacgttgcagtcggagataaagagggtcacggacggagagaaggagaggacacgttcttcctgccgggcgttgatttcggtggcggtcatttgccgttctatttcggaaagtgatataaacatatcaacgaagaaggcttcgcgtatttttttcttcttgtcggcaattctgtctttgctgacatcgtatcaaccggaggtgtctcattcgcgggaaagctgagcgttggtggctccgggcacctccggcgtgaaggttcacctcccctatgcgggcggatttgcttttgtcccggagtccgttctggaaggagaaccatagctggttgccggggataatgtacatgatgtgtgctctggtgaggatgcgcagggatttgatggcgacggtggaatggtgtcgcttgacactggagccggggtgttcttgccggtttgccgccgcatgatgtgtttgcgcagccagttccagtcgccgtcgtagcttgtcatgtcgcttaacagggcttcggcggtatcggaatattcttcggttttacgggtgttgaggcggattatatggatgtacgatttacgagggacgatttgaggagaatgtacggggtgcaatttttggaatgtttgccgggcgttgcccggaatggatgtagaagatagagcactcctctctactttatttcgcagattccgggtcagaggggctggtagattcctgtgtgggaggagacgagcgagggttgtgcattggcggttttatgtaggggaagcggcggtggacttcggtattgaggttttgttctgtctgttatttggggtcgttttgagtttgctgcgcggcgatgtctgaggactggacgacggggtgtttttccatggaggcggccatttctgtcgtcgcccgtgttttgtttctttgatgctttgcactactggtgagacgagccgaggatgacaacatccatgatggcgtttccgatgcttggtcccatggtggttaagagatgagtgtccgggcgtagtcaaatgcttcatcacagcggcgcaaccagcctttgccgaaggttgggtattggcggcatgacctgtagaaggcgcggcggtggtcgcggaggctggagaggaatattccttctccttttcctgcaaggaatgactggagagctctgcgggtgtttgggccaacgatgccgtctacggcgagttccgttccgttgtcaatgagggctctctggaggattttacccgtgtttctgctgccggaattgaagtagtgatcgcgcaggaagaattcggtggcggggtgtttgtcggaaccgatccagttgcgtacggcggcggtgttgtccatgacgtattggaggcaggcgttccaggcagcttcattccggccggaatccagcagttttttgattttgttgaagacatcgggttcgatgccgtcacagatgccggctatttcccatttgccgcctttgtcgcaggagggaaggcgggtgatgcggagggcggccgggccggtggcgcggcagtcttcatatttgaggatggccgcggccattttctgttctgtggagttcatggttttgtgggtggaagatcagggtttcgtgtgtttgagtgcggcgatttccgccttgagttcagtaaggacgcggacggtttcgacttgggccctggtttgctcaatcatgtattcgcgcatgtcgtggtagaggatgccgagggcggtgagcatgacggcgatcaggacggcgaagactccgtccttggtggctagcacgatcttgagggtattaatgaacctgaggaaccagtcgtagggctgacacatggtattggtggtttttgatttgagtcatgaaacggacctgcgcccgtgtggttatttggcatccgggttgacggggatggtgttttttggcggttggacgccgtaggtgatgcggccgtccgtgatggtaaggcaggtgccgtccttacagataacgaggccgttttcccgtgagacgtcgatggtatgaccacacccggcaaacccgagggcggttagccaggcagcggcagccagcacggcggcggtgatgaggctccagaggattttcttcccggtggaggtggtttccctgagttttcgtttggtgtaagcggccagatcgccaagggcgtggtgaccgaggatggggaggaggttgcctgcgattttgagccaggcttgctgttcttgtccgggaaggtcgtcccagtcaatatctgcttgcggggcgatgtctgtccggtacaggatgtagagatctctggcgatggcttcggtatggctgcatgtagtagtgtccatgatgttgatggtttggtgtttggtttgcatccccagagtgacacgggaatgtgctcagggggggccatgtgtccgaaaaggttcgggttaccgaatacgggatgttttcgatgacggcgaagttttcagtggttcccggaaaattgagcatgagggcatgctgaacctgttttgcgggagggggtattcttgcggaatgcaggcgtggtggctgtggaacagaggggaagagatttaccaggaacgaaatggagggacggaagggaaggaggtcgattttcagaggttggcgcgctatagatgggtgaaggtggaatttagcgttgcggcggttctccattttaaggaatggtcgagctgtcatgaacagtatttctgattgcttcccggttggatccgaaaaaagacgagtcgcttttgccgatttttcttccgattttgataccaagaatagtattttctccgatgtcctgaggtttcagcccggagtcgaatttacggatgagttaacgaaagccgatgttttgatccactcggtatttggagcgacgcaccgttcattccagggtacgagggttttttatacgggggagtcagtgatgccccgctggaacgaatgtgattacgcgctgacttttttgcgcgaggaaccggttcacccggagaggcattttcgtctaccatactgggtttttgcggattatatccgccggacagggcgggtggagcagtattctacgaatcctgcggatgtttttgagagacaccggaagttttgcaatttcatgtattccaacgccaatgcgaaggaacgggttcattttttgcatgcgctgtcgcgttaccgccatgtggatagttcgggccggtttcttaacaatacggggggagcaagcaaaaacaaggtggagttctgctcggggtacaagtttacgattgcctttgaaaattatgcagccaaaggatatgtgacggagaagctggccgatgctttcgctgccgggagtctgcctatctattggggagcgccggatgtgggattggattttaatccgaggcgatttgtgaatgcgcgggatttcaaggatttccatgagctgacggagtatatccggtatctggacggggatgacgccgcgtatctggagtatttcaaggggccgttattcctgaagggacagaagtgtgtggacgatttccgggacggtttggatttgttcctgcgaaaggcgctggcggagggtgttgtccgaaatcccggggaatgttccgtctccggctgttcacagcattatgaacgcccggacatgccggagtacgacgatgggaagccgtggaaaagggaggtaaaggaagcggaagtttctccggatgtcctgggtgcggctccgttgcgcgtggcggtttgcctgtcttcctacaagcgggtggaggattttatccggcaggttttttgcatgatgaatcagagttattccaacctgcatgtgttcgccgcgctgaaaggggtgccgcgtccggtggcggaggctgtcgtgtttccgacgctgcaaccgtttctggatgccggaaggctgacattgcgcctgttccccaacaaggaccagtttaccaattttctggatacggtgaggggagtggatgtttccgggtatgacctgtttgccaagatcgacgacgacgatttttatcaccgggattatttccggaatgtacatgattttcacgcaagactgcccgccgggtattccagctgttatgatgctccgggcaaccagttccgcaaggtagacggtttttccctgttgaagaaggtttctccgttgtgcatggggccggctctggtgatgtcgcgccgggtgatgatggagatgctggaactggaagattcaccggaacggatgcgcgaagcgctgaaggagtgccggagccagaccggattcagcttgataggatttgcggaggaccagtttttcaaattcatgatgctcaagtacgggtgcggcaatattgcccggtacctggaaaaacagggcatcaggcatcatttaacgattcaggccagcaatcattcagtaacgcggggaggaagcctgtcggaagacttccgcaagcgcaactgggttatgtcggacaatcctgccaatcatgagtatgtggtgaatctgaagcatccgcattgggagggatatctgctcattttcaacggtagggcccggcggctggattgcggaaatgccgaggcgacggtcgttttcctgtcggatcagaagttggtattgaaatgggaccggtggggacaggaaatttttgtccgggagtcggaaggtgtttaccgcctccaacagctggaagaattggcggaggttccgacttcctgtacggaaaaagaggcggtaggggaagaaacggtttgtttgcggcatcctgtctggagggacagtctgcgtatttgcggaaatcgcggacaacgggtaaaagcggaagagggatgcatgattccggaacgaacggagcgtgtgctggcgctggattgggatcactgggaacaggaggaattcgtactgcgaaatgacgggcaatactggttttctccttatgcctgccagatccccgatacgcaggagaaggaggaggaatggatcattgatctcttggaccggcccggaaagtcgtggctgggacacacgggcagaccgacgctgcatctccgttatgcgagttgggacattcttgcccgcatggaacaggccaagcgggatgtgttacgcgctcttgaggacaggccggaggtaaaacgggtgctggtgacggggatttgcaaggatagtctgcccgctctgtatctcgcgatggaaatacgaaggtttttcccctctatgcgggccggtgtgctgggctgtccgtggacgggcaactcgtctgagccggagctgagaacggggttgttctggccgcaggagatggtggaatgctacaggaaagggggctttgacctgctttttcatcgttacggggatgccgtaaagttgtggcaggaggaacggcggctggggctgggcgtccgggggtatgcgtttcatgcggagagcgacctgtatcgtctggacagggggaggacccggcgagtggagcctttcttgcacaaggtttttaccgtttttctgggaagagaggccgttcatgaagaagtgcatcttcaggctccgaccttcctgcgccgaaggccagaggcgttccgaaagatgattgatatgctttttgaggatctgcgacagcccggacctgacggcgaatgttgccggtacagggttcaggcggacgggataatcggggaagagggatcctaatcagtgaattcagaaaaagctccggcgtaaggaaggcgccggagcttttcgaattttttcagcagatggttttttccgatggtcgtgaacgggacgggagctgtggtttcagggaatatgtcagggaccagagctggaattagaggtccagttcgagcccggtctgccctgcatccatgaaggatgattgcagcatgttcccacatgtccgagacagggaagagtgtttgagggaagcctggataacggggataagtttcatttctttttccgtttccatggtcgtaatgagaagagttcccgcgcgtgtttttccgcttgagcgaggttagtgacctgttccggagaagtggtgtagagattccattggtcctgaaaggcgttgattttcatgacgacgtcaggaagggtcaggaaaaggccatggtagctgaaggaatgtttaaagccgaggatttccacgtagcttttccatttttgttcttccatgagttccaggctgctttttctgcatgaggaaaccagtttgtgtgatagtgtctgaaattttacaagaggccattctatctgtttgaaagttaaagaaatgttttctttttgccaggttttccgaatgggaaacgatgagataaatggagactgaaaaagatgacgggttgaggttttgaagcttttaccggggcggaaaaaggagaatgggccaaagcgatggggtacgggaaacgatttccgggagtgggtgagctatagcaccgtgaatggaatttttcacagttgccgggtgaatggaatggtgtgaaggatgaagacgtctcctctgctgccgatgctgtgcggcgggacggaaggaggcaaaagggaggggtgctcccgggggatttctgatgatggatgtttctctccgagcgcctctcccggcacaaaaacaatcattatttattattttatgagcagaacattaaagcgtctttttgtcaatggattccccggttattacgggggagcgggaacggaactgcaccaccagatcattgtgtggcggcagatgggaatggaggttcacctgatccctaccggggatgggttcggacaggagaccatgttgttggagatggcggcgcgcggcgtgactgtccatgctcccggcgactggtcggccctggaagcggaggatgtgattatctccttctgcaacggggagtttctggagaacctgcccgaaatcaggaaacgcacgaagaggacggtattcgtcaactgcatgacctggcttttccagaaggagcggcagaggatggcggaggggcagattgccctgtttttgtaccagaacgaggaggtcaggcagaagaatatgccggtgctcaagtctctgaatgatgatccggcgatcaggttcatgacgttcaagccatatttccacaacgaatcctttccgtttatttacgaacgggccgatgagtttttcggctgcggccggatttcgcgtcaggacgcggataagtttgcgaggaatacgctgcgaatttatgagtattttgtggctccggtattcaagcgagccttgtttctcgggtttgggcagagaagccggcagaagatcggcaagccgtattcctggatcaggacggcggccaaccagaaggaggtgagccagcaggagttctaccggcactgcaagatcgtactccagccgacggacacgacggagaactggccgcgtgtgggcttcgaggcgatggcctctggcagcgtgctgattgtggacaaccggggcggctggcggcagatggtggaacacgggaagacgggatggctctgcgatcatgagagggatttcattttttatgcctccaagatggcttacgaaccccgcctgcgcgaggacatggcggaggcggcgcgggaacgctgcctgaatctgggagggcttgcggcctccatggagagctgggaggaagtgttcgagacaatggcgaatctgccggagtaagccggagtgtttttcccttcttattttttatttttatgaatccttctatcgaaaaccgtcgtcaggcaagcgggttatgggtgggcgactcccttcccctccttgccgaattgagtcttcgttcccatgtggcgaatgggattgattttcaactgttcacctactgccggtacgacaatgtgccggagggagtacgggtgagggacgcaagggagattcttcccgccgagtgtatatttacccataagaacgggagcatggctcctttttccgactggttccgttatgcatggatgagccgggaaggcggcttctggtgtgatctggatgtgatttgcctgacgccgaatatgcctgacacgtttccatggtttgcggaggaaaatccgggcgtcatcggtacggcagccttcggatttcccgctgaacatccgctcatcatcaatttgcgggaattagcgcaagacccggcgtctcccatgccctgggacagtgaagagacacttgccgcaaaggcaagatttctcagggaaatgtccgatgtacgtgacagacgcagggaagcggactggggaatagccggtccgggtgctttttcccgagccatagcccactatggtttgacaggaaaaacggctccgggcctgagcgtttatccgctcccctatatgcgatggacggatttttatgacggcagcgtttcccttgaccagtttgacagggagaatacctgggggctgcacttatggtctgaaatgctgcggcgttatccgggcttgctggaacgcctgcacccggagagcgtcattacccagcttatggagaagtacggcatgaggccggctcagaggggaaatgccgaacgcaagaaggttcgcatcctggtggggatttgctctgcgcacgggtattatgaacgccgccgggcggtgcgtgaaacctggctgaagcatccgcaggaaggggtagagtgcctgtttttccttggcggagatgtgccggaaagggaacgggaagataccatagggcttgacgctccggattcgtatgcctgtcttccggcgaaggtgctggcgtttttccgctatgcgctggagcattacgagtttgactggctgttcaagtgtgacgaggacacgtatctggatttgtcccgtttgccggaactggccgatccgcagtacggaattgtgggtgatgctcttttgaagcggcggggggctccgagcggcggagccgggtatcttctcaaacgggagattgtggagaaaatcgcagccggaagggatgtgccccccaccggggcggaggacctgattttcgggaaactggctctggaggccggggctgtccctcactctacgccccggctctatatgtccaacacgcactaccccgcgccggacaatgatatggtgagcgcgcactggtgctctccggagctgatgcacgccctggaactgctgcgccacaggaaaccggatacggtttgccatgcggagcataagcactggaaggatgagctatttttttacaaggagggcattttccgacgccgctcgactccctgttacggatggtggtctgtggctgccgatggaattctgactttgcgctggaagtcatggggagaggaacagctcatacggaacggaaggagtttttcgggagcatcccttgaaatggaaattccggaggaagacagggacagcggttctggcgggacggtttttgattttcgcggggatggtgcggataaaaaaaagaccgccgttttggcggacgaacccgaccggatggaacggctgcatctgggctgcgggagccggctgctgcccggctggttgaatctcgaccttccccgctatgacatcacccgcccgctgccctggaaggacggctcagtcaagttctattatctggagcatgtggccgaatacatttccccgagggccttgtaccggttcctgcgcgaagtgtggagaacgctccgtcctgatggtgctctgcgcctggctgtgaccgaccgggtacgccatgccgccggagtgagtctgaactacgaaccgttccgccggcaacagacaggcgtggacggcggtccgggatgggagcttgaggctctgaccggacatgacggagcatgctccttctggacaggcgcttctctggctgctttcctgaaactggcggggtttgacgtgtcggttcatgagccgggccagtcggacgatcccgattttcaagggctggagcggaaggaggcccctccggaagatcctttcctgcttctggggacggtgtgcctggaagccaggaaacccagaggggttcccctcctgccttgccattctgtgaaagcgacggattcacgggcactgacttcagcaggacacaatccggaaaatgagtggtatgtttctccgtttttttgcagtggatcacggacgggcaaccggcttttccaaatagctgccgcttacgcccatgccctgcggcacgggctggaatgccgcgtgccgtggcggagtgaaccgcagtccagccggttatatgaattgctcggctcccatgccgccgtctgcccggacggcgggtactccggcccggtcacgtacaacgaaccctgcttctcctattcccctattccggggaaaatcagacaggggaggctcaacgggtatttccagagcgacaagtattttgacgatttttccgcagaaatccgggctttgtatgcccgtctgaaggctccccgaagggtgggcgaggccggcgtccatgtgcggatgggtgactatctggccaagtcccatcagttccgctcgccggatgccggatttctggagaaagccttggaacgcctctcaaagcatatacgggtattgcacattttttccgacaatccccttcaggctctccaactggtgcgcggtcttcccgctggacggagatttgagctggtactcaatgaggaggatacgctgggcgcactacgcagtatgagcgggatgcaggaacttgtcatgtcctgctcgtcctactcctggtggggcgcctatctgggggaaccggaacaggtgattgtgcagaaggactggtttgccggggtgatctccgattaccgggatgtgtacagagaccagtggtccaagttgtagaaaggtgtgatgtgcgatttttagaattttttcgggtgaaagcctggaggcggggaaatccccacgcgacagatttcccttgaaggatatgccttcagggaaaaaacaaaccatggagcaaaggctcctacctaacccaatacataaaatatagttatgaactataacaacatacagtctgacgaagacgaggattcctcctcctcttccagcctttccgaagaagaaatctttgattcctcctcttcttccaatccctcccaaggcgggggaaatgagtatgaatgggacaagtcctcctcggaagaggaatctgaagagaccggcccggaaactcccgaaaaccccgatcctgacaaaccaaaacctgaaggcccttccgggacatccagcagctattccccttcgggatggtggccgtccagttcgtcttcctctgaatcgagtagtgaatcttcgtcggagtcgtccagcgagtcttcttcggaatcgagcagtgaatcttcgtcggagtcgtccagcgagtcatcttcggaatcgagcagtgaatcttcgtcggagtcgtccagcgagtcatcttcggaatccagtagtgaatcttcgtcggagtcgtccagcgagtcatcttcggaatccagtagtgaatcttcgtcggagtcgtccagcgagtcatcttcggaatcgagcagtgaatcttcgtcggagtcgtccagcgagtcatcttcggaatccagtagtgaatcttcgtcggagtcgtccagcgagtcatcttcggaatccagtagtgaatcttcgtcggagtcgtccagcgagtcatcttcggaatccagtagtgaatcttcgtcggagtcgtccagcgagtcatcttcggaatccagtagtgaatcttcgtcggagtcgtccagcgagtcatcttcggaatcgagcagtgaatcttcgtcggagtcgtccagcgagtcatcttcggaatccagtagtgaatcttcgtcggagtcgtccagcgagtcatcttcggaatcgagcagtgaatcttcatcggagtcgtccagcgagtcttcttccgatccgacagatccaacggacagtgattcgtccagctccgagtcgtcgagcagtttgccaccgacgagcgacgatgagcaatgccctccctgtgaaggcgggagcaacagtggcgattgtgacgaggaatgcagtggtggcaacggtaattctgctcaggatgtccccttcggtacaacgcaggagtccggcggatgcaacggctctctcaatgtctatggggagggaacgcctcccacgcgaggacgctccgccctgggcggttccctttgtgcggttaacgtaacctataagtcgcccatgggaatgaaagccgggtatgatcagaaaagcggctcaatcaatgtgaagcaggactccgggtattctcagagtttcaaggctgatcccggctcgaacaaggccaacgcctccggcgtctcccggcgtgactcggcgatgatgcaactgctcaacgcagatcgtactccctgcacgaacgggaatccggcctatctggaactggcacagaaaaacggctctacccagctattctccgcagctaccggggggatggtgtcgctgcgcacgaagaacggagccgtaatgacagcggaatcctaccaatcacaagtgcaggtacagaaggacacttttgggcagattacccgaatcgacagtgaacgggacggccgcatggagtttgagcgaacatcgaacaagctgaccatgaagcattattcacggacccaggttgcggcacaacgagctcggggcttagggatggcaggctctcccgctaagatgtacagctacgaatggaacgctgcttcccgtacgatgaacattgtcaaccaggaagcgggcaaggagcccgtgtacatcgaacgcaaggtcgagaatactcctgctggcaaaaaggtgacgatcatgaaggggcttggcgacgaacgcattgtaaccatttatgagcagaacgacctgccgggcggcaagtgggaggaaatcaagacggtgaaggggatcaacgattccctacccacttcctgcgtgcgtacggtgaagaagtccacagaaggaggctggctgattttgagcgttacggaaggctacggaaccgcccttgcccaaacgacgacctacacatacaacgaccagtaccgtgtgtcgctggagctcaatcccaacggcggttacacgcaatatgaatacgacgcgatgggtcgcgtggtcatggaagcctcaccctggacggacggagaattcctgaagatgatccgtacgacgtatgccgacttgcggttcaatgattacagacctcagcgtgaagttgttgtcttgaagcatagggacggaagtgaaactgaggttcaaagcacggagtacgagtatggagattccgtacaggttaaccgggtgacaaggatcgtctctgctccaggcgctacaagccctctcatgacgattgaagaaacttacggggaagctgccgtaaatgaatattctcgcgggcgtgtcaaaatgaagcaggatgaacaaggtatccagcatgtatatatgtatgagaatacttctgactatggcagcgcatggaaagtgaccagggaaactcaggttaatggagccatcgtacccagccagagtcaacgcagtgtgaaataccatgccacggatgagaccgttgtaagggaagaagaatatgcccataccggcagtgggtggagtcttatttccaccgccaattatgagtatgacgaccagaaacgacgaatcaagaccgtgcgcggcaacggacgaatcagcacggccaagtggggatgttgcggccctctggaaaaaatcgatgaagatggagtgaagttgtcttacggttacaatacgtcccgtcagctggtcgaagtgattcgttctgcaacggaaaccactcctgaaaagattgtttcctacactcgaaatgcagtgggacgggatcttgaggttcgtaccgatataggcgccttgactagaatcatcaaaaattcgtatgatatacaaggacgtttgatttcccaaatcgacgaacacggaagatgtaccacatattcttatagtcaagatgggttaacgataacgaagactataccgacgggagcaactttcattacaaagctacagcctgacggttccgtctttgaacattcgggcacaggtcaacagcatgtccgctatgaaacgagtattgttgaggatggtatttgtgtaacagaaaaaattgttgccggagattatgaatattctcccaagatgacagttgccaatgctctcaatcaaattttacgtgtgggtaaatctcttgcaaaaggtggttttatttttgagagatactcttacaatgagaaagggcagcttgtgcaaaaagcaacggacggaatggctccgactttatatgaatacgattctcttggcaaggtcacaaaggaagtattaaaattggcgagtattccctcgttctctaattccaagataattacttacgattatttgatggaacgaaaggaagatggaatttacgcaagtacagttgtcacgaagaacaacgggaaaggaggaagttaccggaaaaagaagagtgaacttatttcttccctgtctcccgttttacaacagaaaactattacagttgatcctcgtggagtcgaaaggataaagtggaaagagtactgcggtccttatacccgacaattcaaggaaaaacttcctgaatcggccattacctctgttgtttgtgaagtagatggttttatttcgagcaaaaccgacacagcaggaaatacagttacttacattcgttccattagtgcgtcgggagttcatttcgaaataaccgacgttcgtggcaataccagtcttgttgatcagaatatcatagatctgacgaaaaaaatgacggatgccgctggcaatgtcaccatgatcgaatatgatccaatgacgagcaagcccttccgcgtgacagacgctctgggcaagactgcttgttatgcttacgaccaaagaggccgcaagatagccgaatggggagagagcattcagcctgccgtttatgaatacgacgacgcaaacaggctggtttccttcacaacattccgggcatcgggagaaatcattacgactgatccgacaggacgcagtgatggagacacgaccacctggacttatcatgaggcttccggtttacttctaaagaagtgttacgccgacggaaccgctgaaaactatacctacgatgactgcaacaggatggtcaccaagcagcaatccagagcgataggtacagccgaaatgttcctgatttctacttacgattatgatccgcaaagtgggaatttgctttccattacgcataatgacggaacacctgccgtcagttatgcctacaaccaccttggacatctaaccggaatcacagatgattccgggattcgtaatctaagttataatgaatataatgaaatgacggaggaaagtaccgaggggcttgttaacagcgtgttggagtatcatctggacactctggggagatctgccgggtatgccttgcagtatggcgacaagatcgtgcagcaaagcagacttagctatgactcctgtggccgatactccactgtatcactcaatcaggtcgaggttccattccagttcgggtacaataccagcaatggactgctggacactctggactatcccaatgagttcacgagactcgacacgagagaagacaagcgaaacttcgttgccaagattgcttatctccacccagaaagtatcaattgtccggcaaaggtcgactatgcgtatgatgaattgggacgcccagttatgaagaatgatttcttcgatgatcccaatcccgatatgactcattcctacacctataatgatagaggcggaatgacttccgatgtcatgagccgtgggggggcgtacagctactgctatgataacatcggcaaccgggaaagctcgaaggagggggcgggaacgtccacgatttattccaccaacggaatgaaccagtataatgagattacagcagaggcgggaatgcctttcgttccagaatacgacgcagacggaaaccagacggagataaaaacttctacgggtgaatgggttgtaagctataatgctcttaatcaagcgactagctttacgcaaggaaagaaacgcatcgaatgcaggtatgattacatgagccgccgtgtagaaaggtcagcctacgaaggggataatctcctgtcccggaaatatttcctttataagggatatttgcaagtagcggaactggatactcacaacgcaacggaaactgctcctcccgttcttcgcaagacatatttgtgggacccgagggagacgacggccacacgcattctggcgatgactcgttttaacgaatcaggagactatgaagaagatctgtattacacgcacgatctgctgaagaatacgattgccttgttcgacatcaaaggttgccgccaaggcatgtatgaatacggtccatacggggacattctcaagcttgagggaaaagaagctgaagaaaatcccttccgtttttcctgtgagtattctgaaagtgaacttgggcttgtctactacaactatcgttatttcaatacaaaagacggacggtggataggtagagacttattgaaggagcaaagctctgcgaatctatatagttttggcataaactgtatgccggcaacttttgacgttctaggagcgtggaatgatggattaggtggaaaagctggacccaaagctgatagaggccatagcgattttcctgggcatgatcgattcgattatactagagaagatcatgatgatgaaacagaaccatttaatcctaaggctacatggagacacttcagaccattggctgattcggagaaagatttggccaatgccgttaaaaattgtgacaaagatgcgttcgagcggcattcccatcagatgcaggacttcttctctcattatgggcagggatttcgtgcagaaccctatgggaagtcaatggagcaatctggcagtgatttagcatacgctgctcttatggcggcaacgcctagtgtacctctgagttcctatgagttaaagagattagaggatgcggcagatgtaatgcaaaattatccaacaggacatttgtggcccagtgttgctggtaagctgccaggtaattttgaacctgataatgctgaagattttgaagacgcatttaatcaggcagaggagagatctaatatgtgggtaaataaatgggatgagtgctgttgcgaaaaaaatgggatcccgacccaacgtacaaaagaagatggatcacctgcttgtcaggatgttccggtgccggaaaatccttatggagataaggctgcccctcccaaaaagcctgaacctccgaaaaaacgtaatcgtatcccttctatagatgggttccctttacagttgccaccgtttgatcctggtggtattgtttaatgtaatctattgccccactgttttgcagtggggcaattaacctttttctgttaaataaatttggttccatgatcaaaaaatatgatttattaatactcaactttcttgttctgcttgtttctcttataattgcatctacaagagaaaatgttgttttttgtaaaagcagggaatggtatcccgctttgggtgaatttatgttttttatgctttatataggcatcccgttgttggggtttgtccttagattttatttggttaattgttcatgggtatggcctgctattattttttgcgaaattattcttgcgtggccatgcgggttccttattgcatcttgggcaaaattaacggatgagatttacatcggaatttttatgacagcgcctatattcatgattcctgggatcgttgtaagcttgtttgtgtattatatattgaggatttttattgcaaaaaatgataaaacaaaatatatttccaacattgtattgcatttattgaattatacattagctcttacttttcttgttttgtatgcattaggagtatgagtgatcgggagatgaacccgccaagaaggaactggaaaaactgaggaaggaataattcccggataggaaattttgatttgaacggcgtttggttctgtgtgagccgggcgccgttttgttttctttcgttcgtcgttctcttacgcttttatgcgatacttttgacgggggaggaggagacggaggccgccttcctgaatttcgcggaaaccgaatttctcgtagaagggtttgacttcttcggtcttggcatcgacgacgactccatagtcgctcgcttccgccgcgagttttttgattttctgcatggcgtcggtgagcaggatggctccgtatttctacccccggaattgtatgtccacggcgagcctgctgaccagccagcagggcaagaggaggttgcgggggaacttgcccgcaatttccgggggaaactggttcatggacagggcaaagggagacaaggagtaaaacccggccagccgctctccgtccatcagcagggtgacggagcacataccctttttgcagtgccggttggcctgctgtttgataaaaagtcaagctcctctactccgcaggcaaagccggtgcggctcgcgccggaggaataggctgtcagaaagagggatacggcggcttatccttgcgtgacctattcccacatttcctttgcttttttctgcgttccgccaggagggggaggattaaggaagaggtcggcaacagtcaggagccctgcggcgagagcagcaggcattccacctcgtcccggatttgctttttttccggggacgtgttcggcgtgttcccttgccacgctgagaagaaagacggtgcgggtcaggttgagccgttttgcggcttcgccaatgaccatgcggaatcgttcatgtgaagggtagtctcattggggttcttgttgtttttcgtagccatggataattcctttcctgtttggaagagtgtatattatgaagatatacaatgcgtcatttttttctttgcctcggattgtggcaatgacaaacaaacggccgttcctgataaggaaccaggcgtttgtttgagaaggaaagaacgtgcgtcgccgtccgatcatccagttacgccgtggcggcggaacgggtggattccggggcttttccgtttttcccctttttgcggcgggggcgggagacgctgacggtacggccgttttccagctccgccttgaaggggagacccgtcacctcgcagtatttgaggatgatggtcatgctgatgtgctcattgggtgtggattctatttctgagatgcggggctggcggcaattcagcgcggcggccatgatattctgggaaatgcccgccctgatgcgcatggaggtgaggtatctggcgcaggacatggcttttgtttcctgttcgatggctgcccattctttatccgtcaggatgcctgcatgggcctccttgagcgtcttgtgtcttttgctgttagagggatcggggggaaggtattctttttctccggttattttcatggcgtatttttagggttaaaggttgtcgatatattggcggcagaactggttgtccctgggctgggaagtcttgtctccggcacagatgaggtggctgacctgtccctgaatgtggcaataaaggtaaaagcgcgtctgcgcggcatgagcgagcggctgttgagtgatggcatggcaccccgaattttcccggtggacaaacgcatgttctaccataagcaatgggttgctatgcgcggaaagctcctgctgataggccaccaagttggagagcgtttgcgcgtttcacggggataccttttaagaagtttgttgatgttccacaggtattgttcgcttgtctttaggccccactcattcatgacgatgtcatatataagatatttcttatgtattgttaagggaaagggattatggaagagttcttagagaccaagtactaaagattagagacggggtggaagttgagagttttttgaattgtttccggtgtatttgatggatggatggtagatttttggattattgggaactggtttcagggaggggagtttatttttccgtgaggaagaaagggtgtcggggtgaatgagggggaggatgattttttactgttagtgttttataggtagaggtgattattaaacaaacgaatgattgattgactgttagagagttgacgtgaaatatatcttgctttttttggggttggggagtccattatggaacgaatagtttcttttaccttcttctacaccatgaaagctcttctccgtcctttttcttccctttctctttctttggtcgcgttggcggcgggtacgttccccctcccggcgcaggtgtccgggcaggatgttacacaagggcctgccagtgtcccggaaggggctggaagtgccgcctttgtgtctgaaacggccagtgagtccgctgtcagcggttcttctggtgatggggccgctgccgagccggaggccccggctctgtccgtgccggatggtctgcgcgcgctgtgggcggcgggaggggcgactgatttttccgacgaggcgtggcgtggccgtctgggcgtggccctggcccgttgggacggggtgccgggaaagaatgtagctgacctgacggggagtgatgccttttatgcggcaccggccttctctgaacgggtggagtctctggagtacaatccggcccagtccattgcggataatgccaacggggtgaggctgcgggggctgctggtgatcccggaggatggggagtaccgttttgccctggcggcggatgattccgccgagctgtggctgggcgagccgggggggagccggttcacgaagaagaaggcgctttccgtgccgagctgggtcaacaagagggactggtcgcgctaccggacgggggccaaaagttacaaggcgggggatgtgatctggatagaggtgatcggcaagaatctggaggggcgcgggggcggtgagcattattccgtagcctggaagaagccgggggcggaggggtatgcgctcattccctctacgctggaggatggcaggatcgttttaacgactcctccggtggacccggaggatgtcaatgacatcggcgtgccgcagagctggctgaactctgtagggctgggcaacctgcctgcgggcaatcccgccgtgcggctgtacggggatacggacggggacgggtttaatttattgcaggagtaccagacgggaggaaggccggatgaggcggggggcaatacggggtatttcacgctggagaagtggacgggggtaacggaaaacagtgtggatgcctttacgaagagtgaggcttttattcaggctccgggggtgaagcggacgcaggagggggcgctggatctggcggagagcggggacaattattttatccgtctgcgcacgcaggtagtgcccccgttttccggggagtggacgtttttcctggctggggatgatacggcaagattgctggtgtctccggacgggcagcggttcctgaaacgcccggtggcggaggtgaattcctggacggaccgctatcagtggaagaagtacgggagccagaagagtgaggcgaaggtattgcaggcgggcatggggtatttcctggaggcgctgcaataccagaaggactggggggcgcatgtggcggtggcgtggcagtaccgggtgccgaacctgtgccgaatggaggggacggtagccacgcagagttccacctacggggggtgccctgcggagtgggccattgacggggacctgtcaacgcagtctcacacgaactggatggaggggaattcctggtggcaggcggagtttgcgctgccgcaggcgatcaatcaggtagtcattcagaaccggacggacgggagcaacgggcagcggttaagcaatttccggttgtctgtgctggacgccaacggggaggaactggccgggcaggatttttatacggagacgggcacgtatgccggggcaacggtgacgtgggacctgccggaaacggtacagggaaaaatcgtgaaggtgcaggggctgggcctcaacgcgcaggggaacaagttcttttgtctgcgggaggtggaggtgtatgagcagaacgcgtattcacgggggccggtggtgattacgggggatcatttaaagacgattcccgccgaaccgaatgatacggataataattccattccggatgactggcaggctcaaaagggtctcatggtgggacagaatgggctgacggaaaaggactgttccgagtacggggacccggataatgacctggctccgaactttgcggagtatctgctgggcaccaatcccctggtgcccagcggcgtgccgggctatctgacgcaggacatgtactggaatgtggcggggtggagtgtggatgacgcgctgaagtccgtggatgtgctggcggccacaccgaacaggaagctgctgaaggacgggcggcctgggcggaatgtgggggaaaattatctgcgccgcctgcgcgggacgatcaagccgccggtgacgggtgattatacgttctggatttcttctgatgagacgagcattctttacctttcccccgatgaccggaagttccacaagaaggagattgcgcgtgtggggtatggagcggaggaccggggggtgtacttgacggggtacggccagtgggatgcctatgcgaagcagcggagcaagcctgtgcggctggaagagggcaaggagtattacattgaggcggcgcacaagcagtaccacgccgtggatcatttacagattgcctggcagatgccggggggtgagcgggagatgattcccggtgagtatctgtcttcctttggcggagacctggcggaccgtgatgatgacgacctgcccgatgactgggaaacgcagtacgggatcaaggcggatgacaacgggggcaaggattttatcaatggggcgtggggtgatccgtaccatacggggattacgaaccgggaggcgtatctgctgggctgggacccgaggcagccttccctgccggactttggcgagagtgcggtagatgtgccggtgacgagcgggacacccggccaggggacatggatgcccagcggcaacgggattctaaccccgatggggcgcggggatattacctacacggtggctctgccgggtgacgggcggtatctgctggaaatctccgggacgccaacgggcaatgtgctggaggtggagacgcttaccctttccgtaaccatcgacgggcattctctgggtagcaatacgttgcgcagcctgaacggggaggcggggcgtgtgctcttcctgctgccggagctgaaggcgggaagccacacgattaccatcacgttgaagaatacggacctgcgaagaagcttttccattaacggaatccggctgctgaagccggaggggacgagtgcggacgggacggcgctgccggagtggctgcaccagtacctggaccgggaaaacgctctcacgaattgcccggaagggagcctcacgtccccggcctgcattgagggcaaggcgcgcgcgctgcacctgacgacgctgacagcggggggaacgccgcagacgctccagcagggagcgggaagagggtggtatgcgaatgtggccctgccggagagcggggaggcggtgaacatccaggccgggtttgagtccggggcgactgccgccagctccacggtcaagtgggaagcgtgcgacgtgctggtgaggccggaaatgacggtgcgccggggggacagtctgcggctgacggtgggggcgaatggtggggcttcctctgcctcttcttcctccacaaatggaacgggtgtgaacggtgaaggaacgaatagtgcggcgggtgcgtctgactcttccgctccgttcccggtgacgtttacgatcggggagaggacggtggaaacgacttccgacaagccggtagcggtgaagtttgacacggctggaacgcagtcggtccgcgccgactggcagactgccgaaggcggcacgggaacggcggtgatggaggtacgtgtggcggacgtggagctgggcgaggcgaaggatcttatcacgggactgcgccggacaattacgctggaaaacattccggagggtatcctgctccagaatgcctccccgctgcgggtggacaaggcgctgggaacggtggctgccggaacgcggaagctgattgtcagctcagaggaaggcggggcgcaacacctggtggcccggctgggcgagagcggcccggtggtggatacgctggccttcttctcccacaataattccggaacctctaccctgtcccggattgagacggtgcagcagtacggggacggttccagtctggtatgcctgtatctggcttccgaaagcctgccggagggcgggtatgtgactatcactctgacggcaggcggggggcagttcctggaaggagggacgaagctgacggtacgggcggaggactttggctccgatgggctgtaccgggtgctgatgacggccccgcgcggtacgtccacctccatctgccatattatccgatactatgatgctgacggcaaggagctgtagcagttaatagttaatagggaagagttaaaagttaagagtggagagttgagaggatggacgaaatggacaccagggacatcatgaacgcaactatttgcagaaccggggtggtatttttattcaccgccctgtgcctgactggctgcaaggagggagacgggaagaaagaagccacggcctcccgcgcgccggagatggtcaggcaggagagcaggcaggctccggtgctcccggctgtgctggagctggggcggaagatgaaggaggggcagacggcttatgacgcggtgcgccaggggatgttttctttacccagggagctttcccgttctgacgccacggccctgctggatctgctgatggccccgcccgcccccggctggaatgagctgggctgggcggccatctttaatgacgggctgaatgtattgcgccaggggacgaaccagccggagcggttcatggaacggctgctggaatgctaccgggatgagaacaggcccgctgtcctgcgggattatgctctgcaacatttcggcacgcaactggccgcctggtaccatgacccggaaaacgggaagaagctctttccgaaggcggaggtcaggatgcaggcggaggaggctttaaggcgcgccttgctccccggcaagggaacgacgatgggaacggcctgcaatgtggccgacgacattatcacggcctgcaaggcgagcgggatggacgccccgttcagtgcggacgagctttgccgatcctgcaaggagacggttctttcccctgcggagaacattcacgcgcggattacggccctggggatgctggggcggcatgagtccccggcagtactgaaggaagcgcggctgtggatgatggacgagggccagcccgtcctgttccgggcggcggcgattgcctatgtgggaaaaattccctgcggagaatgaccgtgccgcgctgaatacgctggcggcggatacggacttgcgcctgtcccaaccggctaaaaagagcctgtcccggctggaaggccggagctgattgaactgattttttaccaaccgattttcacacacttacctttattcccttacactttcactcccttacttcaacttttactgcacaaccgacactcaactaattcttaccatgaaaacttattcttcttctctttctaccatggcttccctgatgggggtggcctttatgctttcttctctggggacgctctccgcagagtccgacggggagcagaacaacccggacaagatttgttattacaagaaaaagaaatgtccgaaatgtgaagaaggaaagtgcgataaagatcccgatccggaaggtgatttggtgccctacaaggtatccaatggaaaaaaatgtccgacagacccggtggaagctggactggatgattcctacgagttcgaccatgaggaagaagttcccaaggctcgttccctacggagcggagtacgcgcggcacaacccgtcagactggcggggggattttccccgaacctggtcaatccgaagaatttaaaggtctttggggacggggcggaagtggtgcgtgacgcagataccaatgtccgccagatcaaaggagatacgggattcatggatgcggtgtacacggcggaaaccaggacgctggaactgcgcttttacaagcccgcagacatcaagcccggcaaggtcaacggcgtgtaccagatcaaggagggagtcacttccctgcatgtggtgcgttacgtgcaggaggaagataacacctaccgggaggaacggattgacaacagtgcggcttcccccagcgttaaaagctacaaggtaacgcagacagtggggccggaaccttataccgtgacccacaccaagacttatcttcacggagaaggactgtccgccgtggaataccgccgggccactaacaagatcacggccattccgaacggggaaccgcaggaagaaaagtatctctgcatggtggaagaactgggaagtgacggccagtggcatgtgacggaacgcaaggcggggcgaagggcgacctacaaggaagaagacggagcggtccctctctatgaatgcaatgccgtcaatgaagacgggacaccgatgaatcccattgctacggaaacaacctatacctactactccgatccgctggttcccgcctcctacggcaagataagaacgctgcgtcgcaacgacgggtactgggaaaacaaatactacgacgaaaacgcgagcgcggggctggaaatgacccggacggaaagcccgtggctgaacacggcggcgcacgaaccgggagaggccccgcagggacagatacgcattaagcaggaaacctactgcaatacggatacgggaattgaagacatcacggaaacagtggggggaatcacaattgccaaggaatggacggaaaagagccgtgcagaccagcagaaggtgaggctggtacggcaccagccgcattccggaggggacaagatcacgacgacggtacgctaccgcaacgcccaggacatcccggcgcacctgcgggggaagacagtcagcgtccacaatgcggacggaagcatgagcctgtacagttatgccctgaatgaacaaaacctcacgattacggaagatacgggatatggagcgggaaacagtgtcaaccatggtacaaggacggtcagtatagaggataaggacaacgggaaactgaaagaggaagtacattacgcgctggagagtgatcaagcctactggctggggagtaaaaccggcgttaccttcgacaatgccggaacctgtctgaaatgggtgtatgacaacgatccgaatgattatacggaacaaaggaaggactgctgtcatgtgacctgggaacggggacgagacggaatagaaagcacttatacctatgacgcccaggggcgcaaaacggctgctacgagcaaaggcattaccaccagcacggaatacagaggattaacaaccgtccagtggaaacaggcgaagggaagcaatcaaaagtatctggtcaatgaagattgcaagaatttggccgggcagatagtggaagagaaaagtctagtaaccggaggaaaaatgctggcgacgcagtacaaggaggatattgccgccagaacaaaagcgacgcgtactccctacggaacggcatcaaaccaggttttctcagcagacagccagctccttagtgaaacgggaacaacgggtatcactcaaaactatacctatacacccacggctcaacatggcggagggctggctgtaaccatgacggacgggaacagaagcaggacagagacaacggatttgctgaaccataccgtagccgtgcagtccggcgggaattccctgactcaatacacatacaacgcggcgggaagaatcacgcaaaccgtattgcccgacggagaaaagcggctaaatgcctatgaaaacgaggtacgaatcagcgggctggatctcaatggagatggagcgcttactgccgcgattgaccggatggaaaaaagtgagcgcatttttgacccctcctggcctgaagacaaaggctcctggaaaacgatcacttcccgcgcatggcagggaagctggcagccagtctccctgacgtggacaacggaagacggaacgaaaacacggagccagataccgggacttgccggatatgcgattcaggagaatccccccatcagcgcccaaggaaacagccatacggtaagagcaaccaagccggacgggcaagtgcaggaaacggtttataccatgactgacggacatgtaacaagcacggcgagttcacggaaagatgaaagcgggaagcttgtctccacggaagaaagaacgtttgatccatggggaaatatgctgacttatacaaatgcccggacaggaacgacggcctactcttacgacgaagggacgggtgctcttcttagccagacgatgccggaccagtcccttatttcctgtcaatatgatgattacgggcgcttaattacaacagttctccccgatggtacggaacagcatttgagctatgatacggaaggaagaatcattcgccagtggggaagccagcagtacccggttcgctatgaatatgacgcctacgggcaaaagacggggatgacgacgtaccgggttcccgtaggggatgccgctgcatggccggaaggagcggagggcgacaaaacgacatggacctacgatgccgctaccgggaaccttttacagaagacctatgccgacggcaggggaatgagctatacgtatacgccagggggaaagctcaagacagaaaccaacgcacgcggaaacgtcacaacgtattcccatgatgcctcaggaagacaaatagccgtccaggtcaatgacaacgggctgacgcctacgaaaactttcagttacgaccagttggacaggcaagtttccgcagccatagagggagcagtcgcctaccgatacgtttacaacgaccggaaccagatcactgaggaacagatcacgataccgaccgttaacggcaatctggaacggagcctcatccgttcctatgattcccatggcaggcctaacggctatcaactcaagaacggcgataccgtagaacaaaacctttcttatacctataccccaacgggacaactggcggaagtgagcgcagacggcaaggaatttacctattcctacctgccgaacatgccgaagctcattgcccagaccagcagcccccttcataccgtcacccatgtttatgaggccaaccgtgatgtactcaccagcaagaccaaccgctggaaaaataaagtggacacccccattatttccgcatacacttatacagtgaacagccttggtcaacgaacttccgtagccacggagggcgaagcattcgcttccgttcctgcggattgggcctgggggtatgacgtgctggggcaagtcaccagcgcgaacgagaattattacgcctatgaccagataggcaaccggagaacgaaccggaggggagacgctgcgaataccgtttacacggccaatgcgcttaaccagtacaccacgattggaaccactgcgcccacgtatgacgctgacggaaaccagctcaccgggctgacacccaccaccactgttcccgccagagacacactctcctttacctacaacgcagagaaccgccccgtccaggtgggacaaaacggcgaagtccgggaaagctattcttacgaccacatggggcgcagaatccacaagggagataccgttactttatatgacgggtacaacgccattgcggagtacaagagcaataaccggactctgaaaacgacgtatgcctggggcaatgacctctccggtacggctcagggagccgggggcgtgggaggccttctttccgtaacggagcacgaccgccaactgccgctgaccagctacccctgctatgatggcaacggcaacatcaccgaatatctgacggaagaaggaaccgggactatagccgcccattatgaatatgacgcctttgggcaagtaagccgcaaaacgggaaaccgggactacggttatcaattcagcaccaaaccctgtgacagcatatcagggttaagttattacaattaccgccattacaaccctaaaaacgggagatgggttacgagagatcccctctctgaagaaggtggttttaatttatatggatttgcaactaattcttctacttttaaaatagatttatttgggaaaatatatcaaagaagcgaaggtgaatgctgtcgtgaggcaaagatggatgatgggttacataaatttgataatggaggtgtcatctgttgcgatggaagaaaagtagcttgtaactggatgtggcttccggatgatcggggaggcgttaatgatcgcattgagaaaatatatgaagattgtattacagaacatgaacatagtcattttgatgatattgaagattgtccctgtacagaaggtataacaagaccacaattcaaaccatcaatgacttccgatcagagacgaaacagtgagcagcaaaaaggatgtaaggagataaagtgtcttgaaggtaaattaaataacagctgtaatggattaaatgaaaaagacaaacaaagatgcatccggacaatacggagtcgtatagagatactaaaaaagactcctccctacggagatatttacccaaactgctaataaccagtaatgtaatgaattttagatttttattcgcttttattataccccttttgggctgtgataataataaagaaatgaattccgaaaataagcgtatggataaaattgaatattcatattgcaataacaacaatcagctgttagatccttatgaaaaaaagtgcattattcgtatctattctgatgaggatgcttattttatgagaaaaatattaaggaatatttcgcttttaaagcaaaataataatttatttcaaaatgttcctgattcctcatattttgaattcaatattactcaaggaggaaatgtttatactttttcaacatctgaattatatatcactaataaagaagtgggttctcttaatacagaaactgctcatttgttattaactttttttacaaaaagaatgaaacaacattggggagaatattttttgaacaataaaagaattgagaatgaaaggaatatgtaaatcgattgagtaataaactaaaatgtatagcaactgtatttatgaaaaattatcatgccgataattgattgtcagcaaatcttccagcaaccaaagcattgacataacatattaatcgtctggctatggcaatgagagcgactttcttctttttgcctttttgcagcaactcctgataaataggtctgagtacatcattataacgtgaagcaacaacagccgccatatagacatgttttctcaataatggtcgtccaccttgaatagaacatcttccccgcatacatccgctttcccattctcgaggagccaaacctgcaattgcggcagcttccttgcgtcccaatgtacccaattccggaaaatcaacaatcaaagccatcgctatggagggccaataccttttatgggcaaaagaagacggtaaattcttttcaattcatcactcttgtcaatgatatccaaaataagagactctaaaaacctgatctgttcagatagagaatcaatgacttgctcaatagcagaaatggattcattttgctgatatgctcgaactgctttgagcaaattggatctttggtcaatcaaggtaatcatggagctatgaatatctatcagttttttcctttccgatgaaaaaggatgatctgccttaggatgataaagttcgccgtaccgtgacaaaagacatgcatcaatcttatccgttttggaaagcttaccctgggaacgagcgaaattgcggataaaacggggattgatttttgaaaaagcaatctcattatcacctaaagtataaaccaacaatcgactgtagtatccggttggctcaaggatgacatggcaacagactccagttgtgcgaagtttgttgagtaaaacattcatgccttccaaggtattgggaatggaaaaatggcaaaaaccttccccctctttgaaggcgatatcaatttttgttttggctacatcaactcctatatagagcgcatcgatattattgtcgggattgcatttagcatggatatgattcatagtaactccttctcaagtacgagctccttgcgggctcaatcaactgttcgagcttcaatgaccgaacagggaagccaacgaaccaagctatacaacgagctggcaaatgccgctccagttaatctacgataccgttgacctccccatcctgcaatgatgcatcattgcaggatggtatccggggaacagaaggttattattctttcgttccgagagccagtatatcctttcctcaatacttgagttaatcttcttgtcgaataaatataaaaatagtagcaagaagaaaatgaaagcagaaaccaagatcatgcatcagcgccttgaggcgctcaaattggccgaagaacttggcaacgtcagccgagtacaccgggaaagaggcatctcacacacccagttctacgaatatcggaaacgcttcaaggaacagggctttgaaggcttgagggggacctgcctcccatccacaaaacacaccctcaaaccacatcagtcgaagtggagaagcgtattttggaactggttgctcaaaacccgcaaaaaggatgcggtcacattgaacaatatatggagtaggtgtttcaggtacacttagtttaggatctggagaagcgatggagttagctccttgtatgatggcgtgggtggaagcgagagttaaacttacatctacaggaaaggggtggacgcctacaattcagagaaccattagaaaaaagcatatcaagagaaataaattaatattatgagatttttaattttttgcttttctattttctttttagaaggatgtcattcggatacttcttctaaaatgaaaattgaaaggaatgctgacggactgagaatcatttctacaggatttggtcatgaggcttttgtttggaaatcagacgaccctcaagctgtgtgtttaattaataaagaaggtactcttgtacagtgtatggaaggaaatgataccattatacaaattgaaatccaaccgattgaaggaagtaatagggatcgagttatttactcaaaattcaaaaaagagcaatgttatgataatcaaaaggaaaggcaacgatgagtttatttttgtttgttgatcatgaattgttctcaataaaggcagggacgtaatatagaagctttgtttcacttcattttaattttcggagaatattcaaacaataaaaatggaaaaaattctgttcttccgtttttttgtattatacacgccccgccctttttctgatttgccgggaggattaactatccacccgcttgagttccgccagcattttccaatgttggcgaacagggcctttttagccggagggagggcggcgccggcctggccgatggtggttgcctcatcaaacatgaggccgagttccagattgcggatagcggtcatgaagtcccttaaccagatggcgaggcggccttccgtttctttctgaacggcggcccaatgggcgcgttcctccggggtatcttccttctccgtccagcaggactcccagacgatggaggcgagggcggggacgagtttttcatgaatgctccggagtttgacggcggcgcgggcgacctgggggaggtttctgtgctggtagccccggttcaggttaaggagaaggccgtccaggtcaccggaacggctctggcgccatttttccgtctgggctgagggggatcacgatggagtgggggcggagaggtatcagttgccgaggacgaaagattgaggagtagatttttcgaaggctcccggaggggggctgatttcattttgttcatgtcaggaaacggctttcctgcttccttgttgctttttcagaatttccggggtagcctgatagaagtaccatgagcgattccccgtattcttctcccatggaacggagtttggccgtttgtctgagtgtccgccgtctggagtgtctggagcggcaggtaggtgtttttttggcgcagggatatgaacggagccatgtttttgccgccgtgaaagggattacggaagattgtttccaggatgtggtgcagccccggtaccggtcatggattgacgaatgaaggctgactctgcggtattacccgatgaagaaccgggtttccgacttgctggacacggtgcgggggctggagctggacagttgggagttgtttctttttccgaaggaggatttttgttgttctccggggttgctggagagggtgaaccgggtttttgaccagttgccgtcaaattgttccggttatgagggtggggtatgtcgcgcgatcagggaatgcagggggtatcaatatgtggaggaggtggggggggccgggtgtgccgcctttttacgtgctgacgcgggaagcagtggaagtgttgctggaatgcgaacgtgaccctgcacgcatcgcgtctctgttctccgatgggcgtgacctgaaacacggggcctgcgggctggatgccgatgcgctgatgatgcgcgtgatcatgcatttggaagggcagaatctttctaccgtggacgggtatgttccgtttctggcgtcgattccggcaacgccgcagaatcctctggcggaacaggaggagattctgcatgaggaggtgtgcgacgatccggcctgtgcggagtacctggtggagctggagcacccgcagtggaatgattgtttccgtatcctgggcgtggccggatgccgggtaaagacgggagggagggctgccgtgctgcgttatacgaaccgggagctagtgctggagtgggagaaagggggaagggaatgttttacccggaaggcgcaggcaggcgcgtatattttaaaacgggtgtcgggtggtcggggacggaggatgcccgggagggagatgggacgagtagggctggctgccgccgccctgactgcgccggaggtgcgatggggtgtgtgtgcggtggctctgcccagggagtcctggtactggctgcggggctggattgagttccacttgcgggctggtgccagtctggtggcgatttacgacaatacggggagtacgggaggctgacggcgcatttgagcgacggggatattcaaaaggggcttcacgggctggctgtccggtacagggaggaacgtgtgaaggttatcccctggcaaccgaaaaacccgaagacgggggagattgttcacaggcaggtggaggcgtatgaggattttatccgcaggtacagggggaagctggactggtgtgcctttatcgacatggatgagtatctttactgccgccccggtctgagtgtgggcgggattctggagaagatggggagggtggtgatgaagggctggaagttccgcatgagatgggggatggacggcctcaggggcatacgcacttatctggatcacctgcctctgtccgacggcggggaaaagaattttatccggctgtgtgacgtggtgaaggcggatattcactggtactggcagatgaggtgcggtgtgcaaagtctgggggccgctccggaggagctggctttttgccactataacataggggaccgggagatggctgacggcaacccccagcgcctgatcgtgccgcgggctttcctgaccgggggcgaacggcaggcaagggatcagttaccggagatgaaagattaaagagtagatttttccggaggtgcgatggggggctgtttcctgtaggagagggagaggatgagatcaggatcttgggagcggcgttgccgtcattttttcgtaacggaggggagtttgtcccagcttttgtctagggagagtgggatcggataaaatgttggcatcgttgtttgtggtgtgtacgttttgtttgatatgatgagtgttgccgaggattttttgcaacggaatcatggggttgtcaggcgtgcctactggctggctgagggactttctctgtattctctgtataccttgaagagtcgggaggcggtgtatcaggtctgtccggggggatgccgcgccgaacgcgatgacgcggcaggaggagatcgtccagcttttgtcgcggaaacatccccgtatggtgatgaacctgctttctgctcttcattttcatcaaatgacaacgcagattccgcaggctctttttctggcgatgccccgtggggcgcgggttcccaggggttccttttgccgtctggaggtcaagcggctgcttcccgcgttcatggagatgggcgcggaagagcatcaggggacctggggagcgttcaaggcgtttaatcccgaacgctgtgtggcggatcttttcagataccgtccgagttcgggcaggatgtttttctggaagctctgcatgagtatcgcaacaggaagggcacacgtcccgcgctactgatggaatatgcacagcggctgggcgtgctcaaagggatcacgccttatctggagactgccttatgatcaaaaagcctgtgcgaaatatggagatttccgtccaccagcggcttgtgaatctggcccatgcaggaggaaaagatcccaatcaggtacggctgcattatgtgatggagcgttttttactgcacctgtcctgttcccgccatgcccggagttttgttctgaagggaggtatgtttctgagtattctaggcactccttcctccctccctacgatggatatcgacctgttgggatgccggatcaagaatacgatggaacgcatcggggagattttcaaggagttggctggattggtggtggtagaggatgacggagaacgtggagacttttccgattaccaagggagccgggtatgacggtgtccgggtggagtgcctggcttgtctgggaaaaatccctgtgaaactgaaggtggatgtggggtttggcgatgtgttgtaccccggaccggaacattgtctggttgactccttgattgagggtattcctgcggcggaggtggtgtgttatccgaaggagtccctgattgcagagaagttccaggcgatgaccgttttaggccggctcaatacgaggatgaaggatttttacgatatccggtttctatcacaacattttgagtttgaagcgttcaccttgagtgaggcgataggaaggacttttacgcaccggaggactgatctcgattttgcccgttccctgtttacagaggagttcgttgccagcaggcaggttcaatggaaggcgttttttctctggtttgtctttccagaatgggcacgaatgagggctgacaaaagaaagtttgacaagggtggcgcggtatgtgaaattatgtgtaacaaacctcccccgcttagcctattagtccgttgactcgatagtgatgcgcacttaggggaggtctttttgtttacggttatgcaatacacaaagccccatctttcctttgcagaccaggccgctttgcttatcagcagaggtatgggagctaccaagcaggagttgatggatgctttggaacaggccgggtattaccggttgagcgcttattggtttccgttccgtgtccttcaccctacgacaggagatcgtgaagattttttccaaccggggacttcttttgttcaagtttggaactactaccgttttgaccgggatctgcgccttcttctgctggacgccatagagcgcatagaggtggctttgcgcagccagctggcctatctgcatactcaaggaagagatccttttctttatgcccaggcttcgtatttttcaacatggaagaattacatcaccaagctggagcccatgaagaatcctgccttgaccggcaaaaaagccggtgctgacttcgtggatcatttttttaagaaatatggagactatcatgattacctgcccttatggatggcggtgggtgtggccgacttcgggttcatttcctttttcttccagtattcttctcaaagtattcgttctcaaatagccagaaattggggcgtgacaagtgatgttttgcgctcctggttcatagctctgaacactttgcgcaatgtttgcgctcatcatggtcgcgtgtggaacaaggtgtggaggacgcaaccccagttccctctttatgcaaagcaaccggaatggtacatgacttatctggacaaggcacggaaatgggtgcgtcccccggctggctctttaccagagcctgattccgtcgtttttcattcctgctctacgggatcgttgctttatatttgcaagtacctgctctcccgcatcgcgccgcagtcccagtggaaagcccgtgtggaggatctttttgcggagtttgttcccctggggatcgacataaagcacatgggtctgtccgaacactggcgggaacatcccttgtggaagtagggagattgcttggttgttgctctcttgaggatcggttgaaagcacatggggggctgtttgattactggcggggaaatccctgttggactataaatatattctatcaagtaccaatttgaaacatgagtgaagaagtagttttacaagtattgatctggagcccggaagagcctgaaaacagattcagggccaaggtggaaattgcgccttcaaaatttataaatatcgttttgctttacagtgaacggttggaaggagctgggcgacaactgagatttcgtaatattctttacggcattgatgaaagggggactcctgtcacattcatgatgtgtaaaaaagtgggaggtgcgctttcttggtcgaaatcaagtcaggacatagcgcatcgttataaaattttggcagatttttgtttacatggatgccatttaagtgatgtgaatagcactgaatttacggcagcgtcatttgaaatgaaaggattttatccatggtataataaaaccattgaggaagaagaggtgggaatttttggaaaaagatcagtatgccatttcagattcgctcaatttggtttttacctattctcaaacaaattgtttattctggggacagagacaatgctataaactggaaccctatcttagaattaattttacaactccgcagagtgtttccaatataacggactgttttttattgttttgcgggtttctccatttagcgactctacaagaaacagaactatgggaatttaaatttcatacacaagaccatcgtgagataaaagtttcaggtaatttccctcacctaagagaacgaggaacagaagaagaagagattttagaatattatcattatgccttttcctggaaagatttatctcatgatgaacttgaacttttattaaggaatttttattcctttgtaagagaacatgcagatggctgggaacagtattgggcctatgtgaatggcaacgcatcccttgaaagccggtttttacacatggccagatgtcttgagaaatttggttccatattaacgccttcggcaacaaccaatcggaaaaaatatgaagctcttttggaaagaattagaaatgaagtgacaagtattggcgttcccttttctaaacaaatgattaatcaggctgttgccacacgaaatttgctcactcacggttccagagatccaaggcatctcaatgatgaggtaactatttcttctaaattaacagcattgacgattgaattacaaaggttcgcctatcttatcatcatgcgggaaataggattccccatggaacggctcaagataaaacatgcacggttggttagcttccattctatgtcttttgagatggatggagcggatcagcaagaggagcaaattgtagatttctagccgggttagccggagtcgttgagaggggtgacggtcagcgttccgttttttttcttttccggctttcggttctcttccggggagccgaagagtgggcgaaggagtgatatggagggcgttgcgctttcagttgaagcctgttcctgtaagagaagaatatgagatgaggggaaatgtgaatttggcaagaggggggggcgtatatcagttcattggatgagagagatgtgtatttgaggctgtttttttgaagagaagagtaccttttatggtatatgttcaattcatgagctgggcgttgccttcactttgacgggaagaggctcagagcggggatttcccaggtagtcattccggagccatacactgccagcagccgcatatttcccgcattggacgctcgactaacgacaagatctgtatggcaacgattctgaaatacgtggaagtaattggcctgcctttcaagggcgtgcttgaagacgggaaagtggttatcgtccaatacccccctacggaaaaaggagaaagaccggaagcaggtctgtaacgggggtgtgagggatactggggctccaaggtaaatgtgcctttcagacaaaagagcacatgccattcctgcgttttaccagtcattccacagtggggctggacatggcttcaataacggcgggggtgatggaaaaccattcattggcttcttttttgccttttgccttacggtagtgttttgccatgacggcgggggagttccccagccaggaggcgacctgttcatagaccatttcacgggcgcaggcgtaggaggcgaaggagtggcggagggcgttgcgcttccagttgaagccttcttttttcaaggtttccatccaccggctcatggtccagatgcggcggtttgtgttggcagccgggatgatggagccttctgttgtgttgccgagggagaaccagtattgcagccaggccacggcggcgtcaggcagagggaccaggcggggttccccggtttttgttttcatgtggggaaccatgatttccttgtcttccaggtggatgtccttccattccatgcgggcgatttcccgcgaacgcacaccacagaaggcggcgaggatcagccagggaatatagtcagggtggctggtatagaccagggcgagaagggttttcaattctcccggggagtaggtttcacggggcggttcttcatcggtaatggccgggaggaggtcaatggggttttgtaggatgattttgcgtttacaagcccagttcaggaagacattcaaggcacggcggtaatggttgatggtggtttttgtaggatagcctccggtttttcctgcaatggtatcgtagagttcatcttcaagaccctggacggtttcctctttttcaaagatgtccatgagggtttcttcagggaaatagctcaggcatttggaaacgtccgccagaaaacgttttgcgttcagtctggccgattccgtgtttttccctgctgcttccttttccttgtaggcgaaaaattgagcgaaggtttcagagacgggaggatattgtacggtctcgtcattgtctttttccgcctggatggcgaattggatggcttcatccaacgtcatactggatttgccggttgccagcctattttccctgtgattcctccacaggaccatagctgctttttccgacgtacttagctgaaagttctgtccatcacgaagaatttgggttgtcagatccattgcataatcatccgcttcttgtggagtgagaaagtatttgctgaacccgttgccaactttggggcggtattttacccggaatgggctggtctttctcctgttttccacagaagcgcttattccttccgcgtattttgtgcgattgggaaacagtttgtccaagcgcgattttgcagttcgcttgtgaacttttgtcttctgaatcattgtcatgatgtgatcataaaagaagcattttttgtgatcaaggaaattgtccgcaatttgtccgcaagtttaaatatcccttattttataagggatacatggtgactgttaatcactaggtcgttggttcgagcccaaccgggggagccattaattttctaaccctcacaagtgtaactgcttgtgagggttgttttttgcccggttcagggtgaaaaaggcggaattcatgcgaaatcggccgtgaatcatagtgaagcatgattttgattccgtcttggcatgaaattggcgtgccggagggcatcatgaaacgctgaaggcgaacctggcaacttgctcaaagcgtgactggcagagccgtattccgccaggcttccggcttttgaaaaagaaaggccagatatctttccttcaatagggaacagcaggctgcctcgccaatctgaaaaatgcggacgcaggatggctcttgggaaaaacgttcgtgacgagagaccgggcataacgccgtcatcgcagaatttgtccattcaacgtgacgcccaaggatgtaattgctcctgcatccccaggctcagggccgtgattcccatagcggaacattgatgctgaaaataatgtggacgctccggagaagtgagggcggccatgcctccatggacgcggaacttctggaatggcgttgctcgctaaaaagcataggtattttgagaagaaggcgaatggaaataaaattactgaaataattgcagtaaaagcattgacctgctataataattaagtaggttggcgttgttgcaggaaaacagcgaacaatcacctactgcgtattttaaaacatggaaaaacatgatgttatttacttatgcgggcataaaggcgttgcagccctgtttggaaaagcatgggatatccctatcgactgcaagccactaaaagaacttcaggaaaaatacatggcctccgtcaatagtatccgtgccggcgtatttccgcccggcagggaattgacgatgggtgacggaagaaaggctctggaagaattgtgaaaacctacctggacaaaaacgtctatgaagcggccctggagcgcatagcctattgcttccaggagtttgacaatgttctggtggccttctcgggcggcaaggacagcggcgtcatgctcaatctgtgctacaattacgccgacgaacacggtctgctggacaagctgaccatgtaccaccttgattatgaggcccagtaccagatgacgaccgagtatgtgacccggacgttcctggaacagttcccaggcatccgtaaaatgtggtactgcgtgccgatcaaggcccagtcggcatgcgccctgggggaaccttactggacgccgtgggacgccgccaaaaaaaaactgtgggtgcgggccatgccggaaaatccctatgtggttcacgaagggaatctggacgttccgttccggcacggcatggtggactacgaattccaggacaagctctcgcgccattttgccaaaaagcgcggcaccaccgccgtcatggtggggctgcgggcggatgaaagcctcaacaggtacgcggccgtggcacgcggcaaaaaaaggagatcctacgagggcaggaagtggattacgcagaccagtgccgtgacggccaacgtttaccctctctatgactggcgcgtcagcgatatttggacggccaccgcccgttttggttttgactacaaccgtctctatgacctcttgtaccaggcgggccttactgccgggcagatgcgggtggcaagcccgttcaacgactgtgcccaggaaagcctgaagctctacaaagtgatcgatccctccaactgggcgcgcatgatcggccgggtcaacggcgtcaattttacgggcctgtacggaggcacgacggccatgggctggaaaaccatcaagctgccgcccggccatacctggaaatcgtattatgaattcctgctttccacgatggatgcgaggacggcggcccactacaacaacatcctggaaaaatccaaaaggtactggatgcaggggggaaccgtcgatcccggaaccgccgatgaagtgctggcggcctacccgctggctgccgtgacgggaaaatcgggccgctacgatggacgcgatatcgttcaattcatgggttatcccgacgacatgcccgtcagcaatttccggcaggtgccctcttacaagcgcatgtgcatctgcatcatgaaaaatgactatttctgcagatatgccggattcagtccaaccaagggagcgattgcccggcgccgtgccgccgtcaacaaataccgcaacatttcatgaaccccccctatcaatcccccgtttatcaaatccggcgtgttccgctggaccaaatccgctccaatgcctataacccgaacagtgtggcgccgcctgaaatgaagctgctctaccagagcatcaaggaggacggctacacgatgccgattgtctgctatcaactggaggacggcacctatgaaatcgttgacggcttccaccgctgccagatcatgaaaacttaccgcgacatctacgaacgggaggatggcatgatgccggtggccgttatcgacaagcctcttggaaaccgcatggcctccaccatcaggcacaaccgtgcccgtgggtctcacaatatcggactgatgaccagcattatccaggaactgacggaagcgggcatgtcggatgcgtggatactcaaaaacctcggcatggacgcggaggagttgttgcgcctcaagcagctcagcggcattgcggccctgttccgggacggcgaattcagccgggcgtgggaatcgaaataacgtcaacccgggaaaccatgaacaaatatgtcactcaactgctggaagtcatccagaagaaaacgggctgtgacacgagcggcgccgtgcgctggctggcggaacaggccggagtatccgaaagaacagcctggaactggaaacagcaggaaaagttgaggaaggcaacggaaaagaacctcggcagaattgccgaggaattgaagaagtgaacagggttccgtgtttcattctgctgaatgccgccgggcatccggttccctgctggatgcgcggttttcgcaagcggtttcatgggtaactgcatgaaacttcctgttatccttaagccggcagcggaatgcaggcttttccgcgcggagcagtgatgcagtctggcctatcaatgctccggccatgttcggaataggttcagggattgcggtgtggtgtgccgggaagcgcaatgaacgttgtggaacctcatgttccaacggtgctgccatggatgtttgttttcatttgcggccggccggacggtgcgggaaagactttttccaaagaatgattgcttgttgcaattttttgaattatatcatttttttatgagatggctgctggttttcctgatgagctcttgcgtggcttttggtgaaagtatcaggggagttgtgattaacgtgattgacggcgataccattactctcctggaaaaaacgcccgaacagaagcggacctaccggatacggcttgaaggaattgatacgccggaaagggggcaaaacgggtatgaaggggccaaggagtatctggaaaagctgatttggggagagacggttacagtcaagtacagccagcatgacaggtacggccgtattttgggggaagtctggtatggaaaggtgttcgtcaatgaggagttggtgaaggatggatgggcgtggatctataaaaaattttccgccaaccggaaactcgcttcccttgaagcggaggccaggaagtccaaaaaaggcctttgggcggagccgaatcccatcccgccgtgggaatggaaagccgcgaagagaagggaagatgccgccggaaagttccttactgaataggttgcccgggaaaacgtctctttccgggtgccgtgatgctgccgaacaaggggttttccaatgaatcaaaggcaattttaatagctgccgttgttcaagggcggtcctgtttttccttatccggccgtggcggttcaaagatggcgggaagcggggttcctgccctggagcctttccagggccacgcttccggatgggtacggaacggcaggaggtagtccgcagctttctggatggaagccccggcggccgttttccggtaacggtagtttttctctcccatgcgttccgcaatttgcacgaggtagccccaggcctgaagggtgtaaacactgtattgccatggttccgcccgcttgagttcttccggctgggaaccgtcgggggcaatgtggcggtccatgttggcgaaggcttccgccagccattggcgcgcttcgttgtcgcggcccagaaagtgagccagatgggcgcattgcgccacatagaacaggtaatgattgttgctgcgcgtatgcgcatgcctgccctgcctgctggtggtcagccatgcgtagtactggttcagccacgcgtccacccgcttccattcctcttttgtcaaggccccggagcgtttcaacgccgccagggcatccagaaaatcaggcatgcggtaaaggtctatgatgccgcctccgtcgccttccgtccggtgtccggggcggatctgggcgtatttcaggtggggctgcatgcgggttgccggagcaatgaaccaggctctcagccattccccggcacgggaagcggctcgcgggttcctgttgagttcgtactggcgtcccaggctgcaaaccgtaccgataaaagcggccatcttgccgctgtcgtccatgctgcggagctgttggttctttttgccgtcaatgggcttgtaggggccttccggattggcggggtccggccagtagtagagggcatagctgacgtattcattagcctgcgccttttctccgaacaggctttttttctctccaagggtgatgacgggagcatccagcgggccgccatgcgccgtgggaaggagcagggccgttaaaagaagaaaagacagagcagtgccgccgaaggacatgccttattcaagcaggaactttctgcggggacaaccgggaaatgaaggaatgcgcctaattccttttcaaagccgttccctgccgtttgcgtgatggaaaaaaatggctctgctgacacgggagaggcttttttgtttgagcgaaatatcattttgttaggtataccttataacgaaggagatcatcagagccatgaccagcagccgtgaagattatttgaaagcgatcgccgagctccagcggagcagggagagggtcggcaacaggcatattgctgattatctgggcgtttctgccgcttccgtcagcgagattatccggaagatggagaaggaaggcctggtggagagcatggaaagacgctccatccgcctgacgcggaagggagaggaagccgccatgcagctggtgcgcattcaccggctgtgggaggttttcctggtggaacatctcgggtattcgtggggggacgttcatgaagaggcggagaagctggaacatgcggcttccccccgcttgatggaaaaactggaccgttttctcggttatccggaaatgtgcccccacggaaggaggattccggggagggaggacgggccgctgccggaagggccgctttcccgcctgtccgacatcccggcagggattccggccgtgatcaggcgcgttcccgaatcgaaagagctgctggagcttctcacctccctgggcatccatcttcatgaaacggtagccctgatggaggcggaagctcacagcggagcgtttctggtgaaggcggaagaaggacagaggctggaattgcctgccgccgccgctgacgccatcctcgtggaagtttctgcatgaacaattaacggaaaggagaaaattaacaatgacattgaaccagttgcctgaaggggagaccgccaggattgagtctctcgggatggaaggccgtttgagacggcggttgatggatataggcatgattcccggcacccgggtggaatgcctggaacgggggccgttcggagaccccgtcgcttttcttgtgcgcggaacggtcatggcgttcaggtcttccgatctggaaatgattaccgttaagtccgcgtgaaatcagccatggaaggagaacgggtgaggctggacagcggaacggagaagggcggatcttccggcgcggcggaagaacgcatgcccgccgtggccctggcgggcgctcccaacgtgggaaagagcacggtgttcaatgcgctgacggggctgaggcagcataccgggaactggcccggcaagacggtcgtccgcgcggaaggcattgtggggcgcggtccccgggagtaccttttggtggatacgccgggcacgtattccctgctggcctgttcttcggatgaagaggcggcacgggatttcatttgtttcggtgacgcggatgccgtcattgtcgtctgttccgccaccaatctggaacgggatttgaacctggccctccaggtgatggaaacgacgggaaatgtagtggtctgcgtcaatttaatggatgaggcccggcggaagggcatccgcatcgactgcccgcttttggaaaaacgcctgggggttcccgtggttccggcatcggcggcgaaaggtgaaggcctggacgttctggctgatacggtgcagcggatggcgtggtccggagagaggcggcaccccctccggctgccctatggggagcacgtggaaccgtggctggcgcgtttggaaatgttggccgggcgtcttccgtggcgcggtttgtcgccccgctgggccgccgtcaagctgctggaaggggatgaaggaacgctgcggcttctggagcaatacgcgggaaccggtttgagagaggagaaggaggtgcaggagattctccgtgaggccgccgccgcggaggccggttcttcaggcagttcttttggcgaccgcgtggcggcggtgttcgtggaacaggcggaacgcctgtgcaggggagtggtcgctttgccggacggaggggggctggggcgcgacaggcgcatcgacaaggtgctgatggggcggtggacggcttatcccctgatgttcgccctgatggtgctgattttctggatcaccatcgtgggggcgaattatccttcccaatggctggccgacctgcttggaaaaggccaggaggcgctgacggacctgttccgcctggcgcatgctccggaatggctgcacggcgtgctggtgctgggcgtttaccgcgtggtggcgtgggtcgtgtccgtcatgctgccgcccatggccatctttttccccttgttcacgctgctggaggattccggttatctgccccgcgtggcgttcaacatggacaaggtgttccagaagtgctgcggctgcggcaagcaggcgctgaccatgtgcatggggttcggctgcaatgccgcgggcatcaccggatgccggattatcgattccccccgggagcggctcgtagccattttgacgaataatttcgtcccctgcaacggcaggttcccgacgctgattgccctcatgaccatgttttttgcggggacggtggcgtccgggttgcagccgctggcttccgtggcgggcctagtgctgctgatcgggctgggcgtgggaatgacgtttgcgataacggccctcctgtcccatacgattctcaagggaactccgtcttcctttaccctggaactgcccccctaccgcaagccccagatcggccgcgtgatcgtccgctcctttctggacagaaccctggcggtcctgtggcgcgcggtgatggtggcggctccggcggggatcgtcatctggctgatggcgaatatccgcgttggagactccagcctgcttgtccacggcacgcagtggctggaccccgccgggcggctgatggggctggacggcgtgatcctgatggcgttcatcctcggcattccggccaatgaaatcgttttccccctcatcatcatgggttacctggcttccgacaacatgatggacatggacgatatgaacgagctgaagtccctcctgaccaataacggttggacctgggtgacggcgttgtgcaccatgctgttttccctgatgcactggccgtgttcaacggctcttctcaccgtccgcaaggagacgggcaaatggaagtgggctgttcttgccttcgccattccgacggcctgcggcgtcgtgatgtgccttctggtggcgggaacggcgcgcctgctggggtttgcctgacggatgaatggagttcatgcttccgcggagggatgaaggcggcaaaagtttccctttccgggagtccggaaagggaacgggccatggttccgggtttgccgggcaggcagcatgaagccttttcccgggccgcggatttccgtatcaggccagatgcatgccgccggtgacgccgaagacttccgcagtgatgaagctggattcctgagaggcgaggaagacgtacaggccggagagctccacgggctgtccggcccgcttgaggggcgttttctgcccgaattccggcaggtccttctgcaactggcctccggtcacttgcagagccgtccagatggggccgggagctaccacgttcacccggatacccttggaggctacctgcttggccagggcgcggctgaaggcgatgatggccgctttcgtggaggcatagtccaccaggttcttgccgggctggtaggcctggatggaagaacacgtgatgatgctcgctcccggcttgaggtgcggaagggcttccttggcaatccagaacagggagaaaacgttcacttcaaatgtcttggtcaattgctccgtggtaatgtcctgaatgtcttccaccgctacctgcttgccggccaccagggccagaatgtccaggccgccaagtttttccagagcgtccctgacgagtttttgacagaaggcttcatcgctgaggtcgcccggcagcaggacggcgttccgcccttccttcctgatgagctccgccacttcctcggcatcgctctgttcttcgggaaggtagttcagggctacgtcggctccttcgcgtgcatacgcaatggcggccgcacggcctatgcctgaatctccccccgtgaccagggccttccgtccacggagcttgccgcagccatgatagctctgttccccggcgtccggcacgggttccatttcggactggagcccgggagctttctgctgctgtttttcatacccttcctggcggaattcgtcgcgcgggtcctgcatttcgtgaatgtctttagtgctcattttttcatcagtcatgttttggcgtgaaactgccgggagaaggaaggcgccgcccgccatgcgtaagatagctggccgcgtccctttctccggtgttccgcatttcctatccgtgatgaccgggatttggatggcctgttcaagggaagacatgcttttatttcagcatgtcattgatattcacttatataggattattctgaatgttatttccattgatcctgatagagccgttcattcactggtcttccttgaatcctgttgaatttctccaatccgttttcgggaaaagccgctatgttgtgctgattaacccgcttgatgatcaaatgatttgatcctttcatcctatttgctccgaggcagggcgggaaccttcctccgtttttcagcgcgtccgcgccggatttcaggacagtccgtaaatgaagtatccggccactcccgtcagggtcatcaggaggatggggttcattttccatttccgcaggacgaacagggccgcgccgaacaggagaatgctcgggaggtccacttccgcgatggcgtgccagtcaaaggtgccgcagaaggtcagcagcaggatggtgccgcccgcggacatgatcaggcccacggaagccgctttcagcccttccagcaccccggaaacataagcggattttttatgcctttggaagaaaaggtgcagcagcagcgccgccgccacgccgggaatgatgcatcccagggtggccgccacggcgccgggaatgccggcgatttgcagcccgacgaaggtagaggtgttgatggccagagggcccggcgtcatctgggaaatcgtgatgatatcggtaaaaaccttctgggtaatccagccctggtgaatgaccacctggtcccggatcatcgggatgacggcgtagccgcctccgatgctgaacgctccgatctggagaaagacgctgaaaagctgccataatgcctgagtcatccggccctccttcccagcgttttccggacgtgccacaggctcaggaggcagcacacggccagaatggcggcgatgttggcgtgaaaggcgaagctggcgaggaacgcgcccggaaccagcgcgttcagcagggcggattttctgcgcaggatcatctgccacatgtccacgactatgtccacaatgagggccgtcacgcctgcctgcattccccggaggaccgcttccacggcggtattggaactgaaggcgtcataccagacggtgatgatggaaagaatgaccagcggcgggatgatggcgcccaggcagctgcaaacgactccggccatgcctgcggtgcggtgccccgccagcgcggagaggttgacggcaatggctccgggcgtggattgcgcgatggcggccatggagagaagctcctctttggaaaacagccgttttttccagacaaagtatttgttgatcatcggcacgacaatgtagccgcccccgaacgtgaatgccccgataaagaggttgatccagaagagccaaaggcattttttcactttttctccggtcatggcgtttaaagaggaaggaatggcgttccgggtattccgcctttgcgggaaattcggcagccgttgtccgggaaaaggcggctgaacgccgcgccgttcccgttttcccggaataaggggtggagggattctatcacaggcggcggtggaaggccatgccattacacggataaaggggagaaaagaggtgaaggtctgcctcttttataagcgggggggacaattgcggagcctcccgcagcgcgcagcaggcggcggaacaaaaaaagtccggcaggttttaccctgccggatggcgaagaatcaagggagccgggggagaaagccatccttcccggcttgtttccaggcggaagaaaaaaggaatgcaagaagccggggtcagctttcttcctgttccagctccgctttccgggccaggatttttttcatgacggcgtggcggtctccttccgggatttccacgggattgccgcggtagtcactggtcatggcggccagggcgccccctacatgatgcatgttgaaaatcggcagtttccaggtggagggcttttccgggtcgggaacataggcgaagtcggaagcgggatgttcctccccgtccacttttttcattttgggttcatggtcgcggtccataaggaatggacaaccgtccttgcgggccattgtaaaaaaggccgggataagacgcacaaattcaaccgtccggtgtaaaagcggcttgtcccggcgcatttttattttttatggagccttttgttccagcggtttcaggggagccagcttcaggttcaccatccctcccgtaaaataatagacgggggtttttcttcccggcacgtccaagggagcccttgccattttggattctccaaaaagggtgtcgtccacctccaatccgaagcgcttgaaggtttccctgcagggggcgagcagtttttcctcccgtaccagcctcacgcagacgctcatgtaatggccgtcctttttggagacacggcttttcccctccctcgccagctgcttgaatttttcctggacgtcctttgcccgccccagggaaggcgtggaaaagcaagtgattttttccagcggcattcccctggcctgctgttcttccaggaattgctccagggccgccaggtaatcctgcagcatgtagtctttgggataagggaaggaactgtcccgtaacacgcaggtagcttctccgccgggatgggtatattccctcagcgtgaatttgaattgaggcgcctttttttcttttccctcattttgaatggaaggggaggttccggagtctgttgtatcagccatggaaaccggcacggccagcagggaaagggagacgagggcaatgggcggggaaggaggaatccgcatggttccttttaaactgataacacatctatcgtcaatactttattgtcctgcgaaaacgtattcccctttcttggaggaatcctccggggctgtccgccttccgtttccgcgttttgctctttacaagagggccgggatagatgagcatgagcccgttaatttataattgttcttatttatggaaaatacataccaccatacccagcttccggagggacgcattcccgccctgcgcgtggaaccgatgcctgcggacaccaatcagagcggggaagtgttcggcggctgggtgatgagccaggtggacctggcgggagccaatacggccatgcgttatgcgttgagccgctacatcgtgacgcgtgcagtcagtagcctgacgtttgaagctcccgtgctggtgggcgacgtggtttccttttatacggagattatcaaggtggggcgcacctccgtcaccgtaaaggtggaggtgtacgcggaacgcctgacgaagctctgcaataatattgccaagattacggaggcggagctggtttacgtggcgctgggggcggacaagaagccgattaccctggaagagtcccgcgcccagttcgcgcagtgctgctcccttgaaacgggggacagcgtttcctgttcctgaacagaggcgggggccgcgttcccgcgcgtcaggccgcttttttccgtctgcgggtgatgcccttgtttttatccaccagggcaaagatgaaggagctggccgcggcaatggcgccgatggtgacgaaggtggcgtggaaggcggcttccacggcctttccggaggtggctgaatggccgccgaagctgtccagcagcagggaggccgcggcaatgctgacggcgatggagagctgcatgatggtggagagcagggagttgccgctgctggcgtccgcgttggggaggtcaatcagcgtcagggtgttcatgcaggtgaattgaatggagttggccgcgcccagcagggcgagcatgcccagcagggtgagttcgtgggtgccggggctgatgaagtagaaggcggccagcagcgtcccgatggtaaaggtattgacgaccatgatgttccggtagccgaatttgccgagcaggcgcggcgcgaccgtttttgccagcaggttgctcagcgccaggggaatcagggacatgccggactggaaggcggagtaacccagcaccacctggaagaagagcggaatcaagtacggcaggcagcttccccccaggcggcagacgatgttgccggcgatgccgatggcgaagttcctgatgcggaacagggaggggctgaagatgggtgcctttgaacggaacgccagcacccagtacaggagctggaacacgcctccggcggacaggagcagggccatgcgcgtcttgtcggctgcgcctcctgcggtggagaggcccatggtgaccagcacggcggaggaggagaagaggaagaagcccgcccagtcgaatttctgttcccggaccgctttaaggtccggcatcagcttccaggtggcccacaggcctgcgatgcccaccggaatgttgatcaggaagatccagtgccaggaggcgtactggacgatgatgccgcccagcaccggccccaggagaggccccagcagcgccggaatcgtcacgatgttcagaacgttgacgaacatggagcgcggataggagcgcaggacgaccagacgccctacgggcatcaggaaggcccccccgattccctggatgacgcggcacgccgtcatcatggcgacggaggtggagagggcgcacagcagggaccccgcggagaaaacggagatggcgaagaggaaggtgcggcgcgagcccagcttgtcggagatccatccggaggccggtatcaggacgcagacggtaagcatgtaggccgtcaccagggagtgaagctgcagcgggtggctgttgaagctgcgggcgatggtggggatggccgtgttcaggatggtggcatccagcatctgcatgaagaatgccgatgccacaagaaagggcaggtagcgcagcgctttggaggatgtcggcagtttttccatggaagaccgccgccagtatccggctgggccgcgccgggggcaaggcagatgtttgtcccggcgctcccgttgttttccgggcgccccggaaccgccgttatgccctaggctccgttttacggcctgggctgttccggtgcgcgccgcgccagcacgcgtttggaaagccatgcgcgcacaggttcgtcataaagcttcaggcacccgtaggccacggcaatgcagatgaacaggacgcccaccgccacggggagagcgcgggaaaagggcacttccgcatcgtgcacccaggccaggtacaggtaaacgatggggtagtgggtgatgtaaagggggtaggagatgtttcccaggaaccggctggcccgggaggagatgtcgcctgggatgtcgctggctcccagaaagaccaccgcggggaaaatgacgatgatgcagaaggcgtcatacaggccgttcaggcggaagttttccgccccgcccacgtgcggcatggccagcgcgcccaccagaagcaggctgcaccaccagaagccgtgcctgacccggccgggcttgcacaggcggaacaggagcaggccgccgaagaaggggaacatgagccgcgtcaatcccacgcggcactgttccacgtccagcgtccagccgccgatgttgttgccctgcgtgtagcactggtggatgagggcgcaggccgccaggaagaccaggaccgccagccaccggctggtgaatttcctgatgagcacggcgtaaaggatgttggcgatgtattcgaagaagagggaccaggccggaccgttcagcgggtgcatttccgtccatccgcgaatatccagggaaacggggacgggcagcagcgtgaaccccacggtcatgaccagcagcattttccatacgggggtctgtgcgatgttcgggaagatttcagacccctggaagtaaaagagggctccacccagcagcatccccatgaccaccatgggttgaaggcgcaccagccgccgcttgcagaaattccacaggctcatctttccccagcggtcgtcataggcatacccgatgacgaagccggacagcatgaagaagaagtccacggacagatagccgtggttgatgatctggtccgtgtggaattggaagtccctggcgcttccttcaaacatgtggaacaggaccaccatgacggcggctacgccgcgcaggccgtccagggcggcataatgaggtttgggagccagaacggagggagagagaggggccggagtgctcatggtataagtacggcgaaaagtgattgtgcttacagaaaaaggggcgatgcgtattttacgtgcgcggccgcggaaccccggaacgggtttttccgcagggaaagtcccggtacaggctggtactgagacggcttgcccggcggacaggcaagccgtttcctatcttccacagacggcgtgagacgtaaagaaaaatgatgaaggctgttccttctccctttttcctttaaagagccggattccggaggaaaagaggcccggcgcctacggcgcgggggcaagtacaatggactttgtttccgcgccgctggtgattcccttgacggtcagggtgcattttcccggcggcagggtaaggacgccgggggagtgctttacgaaccgggaccatccgccggttcccggaaaagtgaattccgtcagcttgtcattgatggaataacccagcttgaacagggtggaggcgggatcggcaatggcataatccgtcgttaccgtataggttcctccgtttttggtgaagatttcccagctgacggagctgaagtgggacaggatgttgaattttcccgcatcttttgccagggcatgcgtgatgaggcagttttcaggcaagagcgtgattttgccgctggccgccggctggactaccgggaagatggaggcgggaatgagccggatatagcggatgtaaatgccgtccctcccttttttcttgagcgtaaaggtttgttttcccttaaccaggttcatgcggcccagatggtagattcccccatcggcctcaccgccgccggaagtgggcacattccacaggaagggggcgctgtcgccgcatttcagttcatagcgggcggaagcggtagccgtccaggggaacgtgtaccaggcttcaaggatgtattccccgtcttgggcgacgttgatttcccagcttgcgccggagtctttttccgccatgccggcgatgaatttgacggaccgtatttttgccagcttgcttttggaaagttccgcattttcagccttcatcaggacggttttcccctgaatggcgccggaggctgccgttttaatcagtccgtccgccgggaatttggcctggacggctgcgcagagcagtagggaggcattcagcattaagagcagtttcatgttggatatggatggttggagttgaaagacagatgttaatctatttcatcttgtccttcaagacgctgttgccgtcaataaaaaagtgggcaggatttttcgtgccttccctccggatatggttccggaatggcgagagggctggcgattctccggcctccggagggacttaacaagggagtttttacagctgggaagcttgacgctgggccggataattttccggaaatttccagtagtatgttgagaaggaagaaagaggaaaagctgcttgttctccatgcgtcaagagcatttaatcaacgatggccggaataccccctggctgccctgatgattgatgatgaaacgttatttgctgattttcctcctgtccggaatgggcatgggagcgctgaaggctgaaaaggtcctggacggctttgacgaggaaccttttgaacagcccgtaatcctgcctgaaaaaacgcgcctgtcgcctgtggcggcctatatgggagagccttccgccggcggaacgggaaaagccgtccgttccgtgcttgctgcaagtggtggaggtggccgcaaacagatggccgggcctgaatggaaaggcgggaacggactggattgccgccgaattgtttttccagttgaacggctgttccattaccctggggaggcagttgttccaggatgcccggcaacccgttctcccggttggttcaaggctgttgttttccggcacccttcccgcctcgttgctccgggacgccctgcttccggggaatacttatgagaatccggaaaaggcggatgaaatttgccgtgccgttttcaagaacctgaagagagtggaagggacgcttcccgccgtaccggataccggagctttccgtggaatgcgtgtaccgggctccggccatttacaacgtgcggtggtcgctggagagccgggattatgaagggaatgtgatgcgcgtggtcaggcggcaggtagtggagaaagaggggggtgagactgtttcctatgacgtgtctgtcctctagcgcggaaaagcggcggcgtcttttccgctcactccgccggggcgcattccctggcgcatgaacttcatgcgccgtccggcatacggatgccggggcggcggccctgcggggaaaacacggttgggaggccgcgcgcattcccctcacggaagcaggtgccgggtgcgctcagtgtgactggcgcgatacgcggttggccagcggcttgccttccaggaagtcccggatgttgtgcagggtgacttccgcaatgttgtgcagggcttccttcgtgaaaaagccctggtgggaggtcaggatgacgttgttgaaggagagcaggcgcgccagggtgtcgtcgtcaatgattcggtcggacttgtcttcgtaaaaatattccccttcctcttcatacacgtccaggccggcggaccccactttttttgatttcaggccgtcaatcagcatttccgtgttaatcagcttgccgcgtcccgtgttgatgatcatcacgccgtccttcattttgccgatggagtccgcattaatcaggtattccgtttccggggtgagggggcagtgcagggaaatgatgtcggaccgggcgtacaggtcgtccagcgtggtgtaggtaatgccggcttcttccgcaaagcgctggtcggggtacggatcgtaggccaggatgttcatgccgaaccccttgaggatgcggatgaggattctggcgattttccccgttccgatgatgccggccgttttcccgttcatgtcaaagcccatcagcccgtgcagggaaaagttgccgtccctggtgcgccagtacgcgcggtgtatcttgcggttcagggagagcatcagggctacggcgtgttccgccaccgcatagggggagtattgggggaccctgacgacgggcaggtccgcttcttccgccgctttcaggtccacgttgttgaatccggcgcagcgcagggccagcagtttgacgccgttttccttcaggctccggatcacttcccggtttgccgtgtcgttgacgaagatgcacgccacgtccgtgccgcgggtcagcggcacgctgtccggggtgaggtgccccttgaagtagcggatgtcgtaatggaattcgcgctcgttgatcgggttgaaggagtcccggtcgtagggcttggcgtcaaaaaacgcaatgcggcaggaatggtcggtcatgcggaagggaggggggttaggcggtcggcggttttttcttcgcgcttccctggctggcgacggcttccatgcgtttgcggatttcttccggatcccccagaaagtagtctttctccaggttcagggaatcgtcaaattcaaacacatagggaatggcggtgggaaggttcagggaaagaagctggtcgttggggatgtttttcaggtacttgatcatgccgcgcagcgtgttgccgtgggccacgatcaggatattgtccagcgtccggagggaggggaggatggttccctcccagtagggcatcatgcggtcaatggcctccttcagggattccgtccgcggaagttcgttatccggcacccccttgtagcgggggtcccacttggggttggcgggatcgtcctccgccaggggagggggcgccacgtcatagctgcgccgccagatcagcacctgctcgtctccgtatttttgggccgtttcacttttgttcaacccctggagcatgccgtagtgcttttcattcagccgccagcttttggcgacgggcagccagtcctggtccagacggtccagcacgcagttaagcgtcttcacggcgcgcttgaggtaggaggtgtaagcctggtcaaaagccatgcccttgtctttcagcaggtcgcccgcatgattcgcttcctctatccccagttccgtcaggtccacatccgtccatccggtgaacctgttttcacggttccacgtgctttctccatggcgcagaagaacaattgttttcatatcgctgaatttagacaggcggcctccggctttcgcgcaaaggaatggaggcgtatgacgtgataatattcctcgccgcaggagaaattcctgccgtccggccccggcagtccgccgggggaggggaaggacgcctcacaggtgcggcggcggcgggtaaaattgtgattggcaaccgtcttcaaatggattaacagttcagcatgatgaagcaatatggtttcagttgggctgccgccctgatggccgccggagtgggagcattggcatgggccggtcccggggctgtccggaatgtgcagaagcccgctccttccggtggagcccccgccgtgttcaagttcggcggggaagggaaccaggagttcatgctgaatggaaaaccgttccagatacgcggagcggagatgcatccccagcgcatccccagggagtactggaggcaccgcatcaggactgcccgggccatgggcttgaacaccattgcgttttacgtgttctggaacgaccatgaacagccggacggcagctttgacttcaagacgggcaaccgcgatctgggagagtttctcaagatatgccaggaggaaggcatgtgggttctgttccgccccggtccctatgtgtgcggggaatgggacctgggagggttgccccattatctgctgaaggatcccaaggccaaattgaggactacggaagacgccaaattcatgaaggcgcagacgcggtatctggaagccgtggcccgtgtggcggagccctttttggtcaaaaacggaggccctatcctgatgacccagcttgagaacgaatacgggagctaccagaggaaggaccgcaagtacatggagtggctgaaagcgttctggaccaggaagggcttcggccccttttacacgtccgacggcgcgggggaacatttcctgaaaggggtggtgcttcccggcgtggccgtgggactggacccggggctgaacgacagccactgggaggtggctaataagtgcaatccgggcgttcccgttttttcctcggaaacgtatccgggctggctgcggcactggggggaggggaactgggcccccaccccaggcattgtcaaccacgtccgctggtttatggacaaggggcgctccttcagcctgttcgttttccacggtggcaccaacttcgggtttacggcgggcgccaacaacggggggccgggaaaataccagccggacctgacgagttatgattacggctctcccgtggacgaacagggccggatgaatgaatattacgcccagatgagggaaatcatcctggaaaaactgcctccggaagccgccgtgccggaacctcccgcggacattccggccatggagattccggagttcacgcccgtggtccatgccggcctttgggagaacctgcccaagcccttccggtccaagttcccgcagcctccctatttcgaacagtggaaccagaaccagggcatcgccgtttacagcgccaccgttccggccggaccgcctgaaacgctggaattcgccaacgtcaatgactatgcccaggtgtacctgaacggagagccggtcggcacgctggaccgacgcctgggacagaagagcgtggagctgccggagcgcaagaagccgggaacgctggaaatcctggtggaggccatgggacatatcaatttccacatcagcatggagagcgaccgcaaggggctgcacggccctgtgaagctgggaacgcgcgagttgaagaactggacggtgagggcccttcccctgaaggctgactccattgtccaggcgcccaagggaaagggcccttcccggaaacgggaaggagcgcatttccgggccgtcgtgaacattgaagagccgcaggacacgttcctggacatgtcccgctatgccaagggatacgtgtgggtgaacggcgtgaatgtggggcggtattggaatgtggggcctcaattaaggctgtacgttccggcccccttcctgaaaaaaggggagaatgtgattgatgtcctggaccttcacgagaaggagcccaagcctatccgcggcatgaaggagcgcaacaaggagcctggaaagatagataccaaaaacctggacaaccagtggtaaaaccgccgggccttctgcccgcgtcaccggaaaaagcttttttccatgaacccgcgccatggggggagccgtagcctgggtgtcagacgccctgagcctgcctttttctccggaattcctctttgaacgccttccagtccgtgtctctgaccagttccgcgaggttggagtagtaggaccggtggtgcccgaagcgttcgtccatcagctcttcaagcgccttttccggcgtccagccctgcatgacgatgcggtaggcggcgcagacaatgccggtgcggtcggacccgtgccagcagtgcaccagaacgggcttgggcgcgcggctgatgaccagcaggcagtccatgagttcttcccgggtcactttccctgccgccagtttaatgcggtacaggcgcagtccggtatgttccgcctcatcggcgtcgctgtggtattcccgcaggttcaggacggatttgagccccagcttttccagggccttgaagtccggaacggtacagctccgggctgaggcggtagcagtttctggcgtcttttaccttgatgggagcgggggtttccatcaaggtttctgcgcaggcaaggggaaggggcgccgccagaacggcgagtatcacagcgttccggttcatggcttctttcaggaatcggacgggtaaccgacgctctgggcgtacaggacttttttaaagacggggagtttcaagcgccgctggatatagtcggcgtcaatcatggcgcggaagacggtgccgaggcccgcggaagtacagaaaagatagacgttttctccgatgaaccccacgcccgtgcaggccgtgaccagttttcttttggcgtcaaagtctccgggctgtttggactggtccaccacatagaccaggttcagcggcgcggtagccgcgaattcctgcgttcccgtagcggcacgcatatcgccctgaaccactcgctccaactggtgggtttccggcttgtaaagataggcgccctgcggcaggacggcatagatttctatttcgttggaattccgggaggacggcgccgtacggtaatcaggatcgtcccggttgacgccttgagccgcccagagcagggaagaaaggatttccatcggaatgggcttgtctgcgaaggatctggtggaatgccgttcattcagaacctgcatgagcggcctgccgccctttttgtccggcggaggcagcatgatgttgtcactgagggccgttccggagaggaggcctcccgaaatgacggccagaagcgggctgagagcatgagaaatattcataggcggcgaaagacggataaagatgatggaataatcagcaggatacttgtatttttctcatgtttttgggaacacgtgagaacctcatcctataaaatggctatgaaaacacaaggaaaaatcccttggtttgattcttaacgggttccggaagatggactcaccggaaaagaccgttgtttcaagttgaccttgggagggtattgcgcttttatgtcaaacggaacaggaatggaaatcttttttccttccctgcccaatttgctccaacccgttcaagccttatcccatgaatcctgttaatcccttgcgtcccggttctcccaagcgtaaaaaatcctcctccgggggaattgtcatgaccattatcctggtgctggctcttgccggcggcggtgtggtttaccaccgcatttccgttcaacgggaggcggaggccgcagagctggcggccagaagggacgcggaagcgaaagcggcgcgcgcaagaaaggccgcggagctggaggcggcgcgcaaggcggcggaggaacgggcgcgtgcggaggcggcggaaaaagcacggctggaagcggaacgcctggctgcggaagaggccgccagaaaacggcagcagaaggaaccggagaaggtgaagcctgctcccgcggaaccgaaggaagagcccgtggtccgggaggaagacccgcgcctggagattttcaaaaagcccgttctgctggtcagcctgaaggccaataacgccgccaatagaaagctgtttacggatgccttcaatctggccctggagacgggccgctatgatttgtacgccggtttcctgcggtccaatctggaacgggacgccgtgaaggtcatcaaattcggcaaatttgacgtatccatgtacgatcaaagcccgtatctcatgcgcgccaatgagctgtaccagctcatcagcaaagtgggggcggaaaccattcaggagcagctcaaggagagttcccccagatatttttatccgtggcttttttcagacccctccgaccctctgcggctcttcctgcgcacgatggcgcgggaacagactcccagggaggaatggggaggcatcctgcggaagtgggcggagttctggatgaaaacctccgccatgccccggagcaagtattcctccctggcgctggcctgcgccatgctggacccccgcatcgcctccagtccgtccaggctgcgggcctcttcttccaccaacatttccactactcccctgacgctggaacaggtgttcgagtacttcgtggagatggatgaagcccatgaacttctgacagatattaccaaattaagcccttccgagctgctgttcgtggtggacgtgcgcctgccgaggtcggagatggactgggcgcgcaagaaggtgcggcttacccggaagggctggggcggcgcctattccatgatccgctaccggatggaccgcgctgccctgggcaaggacccttacacgaattacaccttccaggagattctggatgaaggcggcatctgcatggaccaggcctattttgccgtgaataccgccaagtgcaacgacattccctccgcctacgtcaccggggacggcaaccgcggcccgcacgcctggatcaatctgctgacgacggacgaaacctggcagtcctatggcgggtatgggtacaatacggggcatttttcccatccgcacaaccgcaagtcaaagcatgaatccactcttctacagggcatggacaagaaggtgaacggctcccggctggacacctccctggattacctttccctggcggacctgtttgaagagatgcagaagccggattgcgtccgggtgatgctggaagccgccacgcaggccacccccggaagccctctgggctgggaacgcctgatcgcgctgatgagccgtccggaaagcggcacgaagctggaggaatgggatgcgctggtgaccatgatcaagcgcaagttccgctcccggccggattacctggccatggccgcccgcgtggaggatgaatacattttccccatgagggacgcctccaccaacaagcgcaatgtggcccgggacctgaaaaagctggaaaaggagacggacgagggccgcagcgacctgacttccgccgccatcaagcggcaggcggacatcctgatggagaacggggacaaggccggcgtggcttccctgtaccgcaagtccatgaaggattacgcgcgccgcgcggaagtgttcgaggcgctgatggggcagtattaccggtatgtctcccaggagccggaggccgttcttcagctcgccaaggaggcggaatcctcctacaaccggtatatccggaccaagtcggacgactacttcaaggtgaagaaggaggttgccatccagaggaagatagccgggtactatgaaaagggcggcaatgaaaagaaggccgcttccctgcgcaaggacgcggagaagcgggagaagaacagcaagaagggcatccgggaggagggatagcccggcaggccgcctgcggccccatccatcatttccccaggcgcgcggccctggctgcctccggctgcggcatacccgtggaatgaacgtttttaggctggaatgctgtcttatcttcaactaatacatgacctatatggcaagagaaccttacgcgaacttctggcccaaagtggcggataccgcttttgtggcggaaagcgccgacctgatcggagatgtcaccattggagagcacgccagcatctggtaccacaccacgctgcgcgcggacatcaacaagatcgtcattggagattactccaatatccaggataatagctgcatccatctggcggacgacttcggctgctatgtaggcaagtacgtgaccgtgggccacggcgtgattttgcacgcctgcacggtggaggacaactgcctgatcggcatggggtccatcattctggacggcgcggtcatcggccagggatccgtggtgggcgcgggcgcgctgatcaccaagggcaccgtcattccgcccaattccctggtgctggggtcccccgccaaggtggtgaaggacctgggcccggaatccgcggataataaccgcaagtgggcggagaaatacgtcaaggtggctacccggtatacggagcgagtcatcaatcccggtttttaacatttgatttccgcacgccatgccggatgaaaagctgatcaccctggaaccgtacgccctgctctatacccgggccggggcaggtgtgtgcctgcgtgatccgctgaccggcaaggcgggcgttatcttcatggagctggcggacggcatggcgctggagcgcagcctgaacggggaacgcccggtgcggccggacacgtcctccctgctgtcccattttttatccgccatggagtgccgggtgaggctggtgctcatcaatggccgcaaggatgaagttttttacgcccgcgtggcggtggaggccgccaacgaggtcatggacaagctggtggagctggacgcccgcccgtcggacgccctgatgattgcggcccagttcgggaccggaatcaagattgttcccgccgtctgggaaagcatggagaacatcctgccccagctggaacagctggacgcggattccccggacagccgcgcgccggtgtatgtgggagagccgtaggagcggcgcttccggctgccggaccttttcccgcctcccgggcacgccatccggcgcggctgcggcttgaggaaccgtctcccggtttgccgcccggaggcatgattgcggcataagattttccggtccttgggcatacctactttttacaaaaaaaacttgctaaggcgccggaatccctatacattcgccgcacatcacttcaagtgggtagattcccgagcggtcaaagggggcagactgtaaatctgttagcattcgctttcgaaggttcgaatccttctctacccaccactttactatcagcaagttagatgtatttttagctctctttgatgagagcttttattttgcaaaaaaaagcgctttcgagagattttatgcacttttagtggcacctatatggcactagaagaagttgaaaaactgactttgagagggtattttaaatgaatgcctcgacaaccttccatgaagccaaagtatgatgaaacccgcgcccaacaaaataggctgccttggtatctttctatccctaaaaaatttttctcctactggcaagagacaacgacggtttttccctacaaaggaaatcgcgcgagcaagagccaaagcaatagaaaatcagattcggcaaaatgggatggattctttccggctttccgccgtcgatgctcaacacatgatttctgctaagaaaatgttggaagggtatgacctttcctttcacgaagccgtcttgtttttggagaagattctggaaagaggcattaacctcgatgaagcctatgctctttttttacagggatgcgaagtagaagaagaaagaaaagggtcgaaaaagctgtatgaagcggttgattatcacatttccctaaaagaacggcaaggaaggcgagggagaaccattggtcagttgcggagcattctcaataagataatgaaacaaaatgtggatttggccgggaagtttcttactgatgttactattgaggattgccggagcatggtagaaaattttttcttcttctgaaagacaaagaggagatgcaaagaaaatgttgagggcagtttttaatacagccatgaaaaatgagtgggtaacaaaaaatccggtaatggccgttcccattggagcaattcaagaaacggagattattcccctgacgcttccggaagtgagacaattgtttgccgcttgtagaaaggcgaatgaaagtgaggtagagaagaagagcctaacgctggatacgtctgattgcttgattccgatggctatcatgctatttgcggggattcgtcccgaagaagtcacccgattggtatggagtgatattaatgaggaagaaatgattatttctgttcgcgggcaatcatcgaaaaccggaggagtcagacacgtcaagatactgtcccctttgaaatcttttttagaggtgttaaaaggttcggagaggctagaaggcaggcttgtacctcggaactggtcaaacaaatggagttgcattcataaacgagcaggatggggagagaataaaccatggccttcggacgtgttgcggcatacatttgcttcatatcacaaaaagcatttcaacgatatggctcccctaaaggatgcaatggggcatacaagtgagaaacttttgagagacagatatacgaatctcaaaggagtttcagagaagacagcaaaggaattctggtctgtgaccgctcaagatttgattgtaggctgataacattttgttaggctaagagtacaaatatggaaagacggaaaaaaatttgaagttcatccgggagaaactgttttttttaccaaggacggaatctttagagaatatctctataacataagagaaggagtatttatttatcgggatgaaaagttttttgctcgcccatattttgctgataagaaaagtaaattgagaaatttatcgataagaaaagggattatcgaaaatggatggtatatttctgagtttggagattttctcgttttagcacgcctgaagaagaatggaaagagaccttttgacggagagattaatccctcaactaagtttttagcctcgttacctgaacaagccaatttgcccgcatcacaaattccatctagatgttttgtaagatatggtcagatagaggctcgtgtgagaaaacgcatagaaaaagctctgaagaattttgattatgaagagttgaaacgagtagcttctttgatggaaattgccagtaagtatctatacttggaagagcctcccgaacagaaaataccggaacaaatgttgaggctttcaaaaataatggaggatttattgtcaaagaatttacgtcttccaacgcctaatgaaattcgtgaagaatggataaaacgatttgataatcaaatatctgatgcaaacgatgcagaagatgtagagtcattaaagaattcggaaaaaagctctaaaaggatgaacgagattttaaggcggtggggtttcgaatggctaagagaaccaaaagatgattattttgagtaaaatcatctataatgcttaaaagcatttgcggcgatgacaaaaatgcggggagtatgctttcataaaaggcatgcaacacacagcatcttccaaaaaacacttatgccgcatcaacaaatttgcggaggaatcaggattgtttacagagggttctcgcccatctacccggactgttcataattggaaaagagacggcattttagagatggtccaaataggcaatagctcctttgtggatattgataaaactagggatcggatttttaggtctgatatttattatcgaaataagctgaaataagaggagggatttgtagccctttttctgactcccccatttttgaaaatgggttcaatgtatcaactctgaaaaaccgcatagggtgggagaggcgatactaatagaaatatatcgtagataatgagattagaagtctttctaaaagtcagaaaataaaaaattaaaaataacaagtaaattttttttgttccagatgtaaagagatatgaagggtttatcaagatataggcccaaacaataaaattaaaatacatatgtttgacatattattagaaaaattgatggaacatcagcctaaaatggctcgtaggattataacgttaatatctattgttgaatacaatagaagaaatcaaacggcaaacatctttcgtaaaaaagaaatggcgttaatgatgggtattagtcccgccgctatctgtggaaggcattggaaccgctgggaaaaatatctttccctattcttcgatattgaaaaaaacggcgtttattatgctcttacccccaagtatgaatgcaatgaggatttcatgtttagttatcctccgggacctagaaggataaggacttatgaagtcgctccagaagtgctggaaaagaggaaatcattttttccttggatgaaaacgccggaggaaatggaagtcgaacgtttaacagcattctttgctcattaacgatttattataaaccaaaccccttcccatttgcagaacgattagtcatccttttggattcaaatgaaaagaggcttaatataatttgaaaatatgaagaatacttatattcaagaatatttacacacaaaagatacagatagtcaaaaagtcatatcactggaatcatttcttgattcaatcaagaaggaagattacaaaactcaaatagaactcatccgcaatactgatgataaagagaaacggagaaagttgaaatctgaccttccatcagtaacaattgcaggaacgtttaagggagggcgtaaagacagtaatatttcatcaaaatcgggattcatggtgcttgattttgataatgaagatggaaaagagcacaattgggagagtctgaaaagaaaatcctcagaaatgactcaagttgccgcctccttcatttctccttcgggaaagggtcttaagattatcgtaaaaattcctgagtgggagtcaaaagagaacttcacggccatttttaacggagcaaaacagctctttgagcgggaattaggcattaaaattgacgaatcaggaaaaaacccctcacggctatgtttcgtttctagtgatgcgaacatctatatttgcccagacgtcagtgcgcttatccccgtagaaccttgttacaaagagacggagaaggccatttctccgaaatatcataaaaagcagagtgtgtgtgaaaatgaatgggattctctttctgaaaaagaacggatatccgagagggaaaagacagtgggggagctggagcaactggccgatgttttattgaaaagaacaggacatgcttatattgagaaatatgagcattacgaaaaaattcttagggccgcttggataatgtggcaaggtgaagcggttgaacatctgaagaaaacgaaatttacatgggatttcgaacagaacattgctgagaaaatgaggtcgtttgaaaattctcatgctctcccactggcacttgtgaagagcgttcgcaaggagattgatgactgcttttgtgaggaagtaacaaaagatttttatttcctgggcaagacaggttatctacaagaaaatggagtccattacgtggactttcgaaaggaggatgtagcattaaagctgagagaaagagggttaagcgataaacgaggcgcaaaaaaccttaccgaagtcgaaaaagcaatactgtacatccagcagaataaaattgttcatgatgtttttgatggttatgcaggcaaagagcgaggttttcatatcattgataataaaaatgttatcgttcgctcccaagccaaaatcatcacgggtgagtctggcagatgggacactatcatggaactcattgattcagtatttgtcagcgcagaaaatcctgagcaacggaaaatctttctgaattggttgaaaatagcacgttgtcggctgatgaaaccggaaatccattataaatctcctctcttatgtcttgtaggtccggcaggaagcggaaaaagccttatcatcaagcatcttcttgctccaatcttgggaggcaggatggggaatccctatggttacatgacgggcgcaacacgtttcaatggagatatgctgggcaatgaaattcagttgatggatgatgttcaaccaaattttgacaataacacgcgtcgggccatttctacaagattcaagggatttgaatactctaatctggtacacatagaaaaaaagggggttgaagcttttagcgcatatccgctctggttttttgtgatggctctcaacgataacgcaaaatccattcaggcgtttcctttgttggatatagatatgcaggacaaagtttgcggattattttgcaatgggagagtaccggaaatggcacatcaggacgctgtagagtttgatagaaaaatagcacaacagttggctgcgttcattaactggctggaacatgaataccagattgaaaatacggaagataattcttctgtgaaaagaaacggcttttcctgttatatccatcctgagattgaagagcggctggaagacgctggggatgaaggacgtctccttagacaccttgattcgttaggatttaaagaaaaaatctcactaacggcttatggttggtcggttgaattacagaagcatgagtatcatcaaaaaatgaaattcttgtcatctccctgtaatctgggggaaatattttccaaattgagcaaaagtcagcctgagcgcatcaaaaaaggaaagaggggcaacaaggggtactactggatttttgttccttacgaagaagataagttgcatgtgaaacgaatagaaggaacgctcgttcctttttagtaaaactgacgaacaacggggctgtctcacacaagttgaggcgcccctattttttgcccccaaagcgtgttgggttttgtagccaacaccccacctgcacagaaaaatagcgtcattatatactaatatttatatagttatataaatagtgtagtaagtgtatcatttttgaagttgatataagaaaataatatatatgggcgggggcagcggcttctctgctaagctattatagacttgttttttgctacactagcagcactcttatgacaacttttttataattaacaacttatatataataatatcgcaaaactgcctgcacttttcaagaataacgtacacagcattaggagctatcccacgagaaagccccgaatagagactaaaaatctctttgctctggattatccaaaacttcctgagaagcattttcttcgatagtctgggcaatccaatcttctattttcatattggctctaacggcctccttcattgccagattgagaacatggctgctaagaggaactaccaattgagatttcatctcagtgggagaaagccgctctcccgccataatgcggtgcaaaatagcatggaaatgggtaggtattgaattgcgcttactggagaaccagttatcaacagttgacctttgtatatcaagagcttttgccaatgcgctccgggaaacggcattttctttcatccattttcttaactgctcaagagacacaaccggagctttttccatgtcgtcattttctcctctatgagcgattttgtcgaaaaataatctcttcatcctgcaatttttctggacaatatgtcatatattatactatatacgcccataggagcgcatatgacgaatattgtagccaaagaagaacagggcaatttgatagttttgccggatttgtccgcgcaggcttacgaatggctttgcaagaagagcgttgaggaacggatttctgtttctgccctgattgagcgattgatattggttaaattggttcgtcacaagctcttgaagaatgcatctccaaaataatttttaccatcataatactatgaagaaaaacatactcattgcaggcattctcagtgccatttctcttgccgctatttctcaagcctcagataatccttgggaatactactgggctggtagttctcagaagaaatcacggtcctacagccagtcctataatgaaactacatatggagtaggaatcaaagggctttatgcttgggcctctcaggactgggaacccgatatgggaggggtacttgctgatttccacgaaaacatcagtacagaaagcgtaattcatcagctttcaatcacatctgggtacatgaaaggaagtcatgattttggtattcaggatacaagtagaaaaatagttccattgctagggggctatactctgcatgttcctgtctgtgacagtgcttccctctatttcggtgcaaaatatggaatagcatggacatggcttgacgagaaatccaaaaccagcacggcttatcgtgaggtaaaacaaagtatcagtatgtatacgctcaatgctggattagtttttaatgtcagtgaaaatgcgaaaatacaaataggatatgagcttataggcatgggttctaattgctctccgtggcatgccattgaggcaggatttagctgggatttctaattttcaaagcatgactaaacgtccctttttctgattctggaagaaggggcgttttttattcgaaagaaacaactctattatacgcatggaaaaaataatatctcatatcgtcattttaataactcttttcttatcagtctttccttctgctaaggccgatttgggagatacccctgaggaaatgaatgagaagtggggcgaagggaaggaaggaaaagctggaggcactcatgatttcaaaaccctcacatgggaaaaagaaggagtggaactaaaggcctatttcacgttccagaacaaatgcttcaaaatggagttcttcaattgccctaatagagcgggagctttgaagctactaaaggagcatatctcagttgatttcaaattcaccaattcgttgcgagacgacgattttaagggaacatattggaatcaagcaaaaaacatcaatacttggtatattgtaaaacagaaaaaactttacgtacaggacaacgacttattatcaaaaacaaagcaaagaggaaaggaagttgacgaaaaggatattgtcctgcccgcttccccattattaggtgagacacttgaaaaaatagaagctcaatttccgggaggtaagaaatctaaaacagaagcaggaattacaacaattctttggggcaaagatattgataaaggtgattggggaaagcaaaactttcaagtagaggcgctttttactcctaccagtaatctatgctaccatcttgtgatacgaaaaggaatttcggcatattgtattagtaaggaagaagccttggttattgctaaaatgttgcttcctgatattccgttaaaaattgttaacaataagaaagatagtaacaatttcagaggagaagcgactttgaagaatatcgccaaaagagtccattttcaatatgtcaaagagcatggttacgacccttctgaatcgtgggcgaatttttcagattggaagccgctctctaagtaagcaaagggataatgaagtcagaaaattacgccaaggaaaataacccttcatcttctatgaaaacaacattatctgtaggaatagccgccttctgcctttcttcctgcactcagtacgtttctgaaatgtacggtcattttgatgcccgtaataaaaccatgtctgttcctcccggcatggatggaccaaaaagcgaaatcaaggcggctctgagaaggcacggttggaagttgtacgcttcaggcatgggggcgactatggaacaacaaggctcttcccgacttctctatgccgatacctcagccaagtacaaaatgcttctggaatacaacataacccagaatgatttgattctgggaagagaatattattacaacctgagcatcattgaaaaccgttcagggcaggaagtcttgacggctcagggagcgcgcacgaatgcccatgtttttgcagaacacctgatgaccgatatttcttctcatacgtactaatatcaacggaatctatgataacagataatgatacttcaggatgtggctggctggtatttagtgtgattttaatttgtataatttgtgtaggtgccgcttatcctgaagtttttattgctattactcttctcgctgctgttgcttttattttatattggatttgttgcgatagtggagatgataatgattcaatcgataatacagaaacggaaaaaatagatagaattatgaaaaatcatgaaacgacaaaaaatatcttcattcagcatagagataaatccatattatttctagaatcattttattccactgcattccatattttaactaaatatttttcagttttgtacacaaaatataaacagtgcatgttagaagatgattatggaattgtacgtgataaaggttggtctaaagaatttgtttacttttttgaaaatgtttttcttgaggagatgataaattcccctaatatttgttctattaacgaacctttaattttaataaatagttataaggttagtatttctcaagttccagatagtataaaaataaaagaatgcaaaaaatttaaatcctatcattaggataatttttaaaaatgaagaaaatgaagaaataaaaatgtcaaataaatatatagaagaaaatacaaaaggaatatccgcaatggatatttgccgattgcaaagggaaatattttcttttgaacagtataaaagtagaactactattctaaatggatacccttgtatacctcctacttcatttttaagtggaaagcctgtcttgtatataactaaagaaatgctattaggtaatcctccttggcctgagaaagaaaagcataaattattacatctactattaaatatgtttgattttataaaggagcgtatagaaatatcttctagtttttctatcgagaatttgaatccctacgaatttgaacatagttgtgcagaggctttaaaagaactaggttttgaagcaagagcaaccaaaggttcgggagaccaaggagttgatgtaattgctgagaagaaaggtttcaaagttgccatccaatgcaagttatatagcaatcctgtcggaaataaggctgtacaggaagtcatagcaggaaaacaattttataacgctgatattggagccgttgttacgaacgcctcttttactccatcagctaaacaattagccagtacgtgcgacatcttgttgttgaatattgtggaattgcataaattggctgagcatgttgaacaattagagaccgccacgtaatccctgtagtgttaccaaaaaatcctcctctaatcattcagtgctgaaaaagaatttttcgaatcttcataacagtaaaattactcagcccatgaatttttcatgacctttcgaacagaaatgccctccttaaggtctttgatgacttttgtatatttggcaaggaaggcctcttgagactcgtgacttcctttcgggcgaccgcaatgaataccccttgcctttgcggcctgtattcccgaattaatgcgctccagcatagtctcccgctctgtctcggccaaatcagatagaatcacaaacacaaggctcgcggctggattcctcttcccattttcaagaagtgtctccatgttctggttttgccagtaaagagatacctgtttcttttccagttctttgactacggaaatggcatcataagcatttctccccagccgagaaatctctgtcacgagaacctttttgatttttccttctctggcaagggctaaaagcctttgtatgccttctctctctcccacttttgttgccccagaaatcttttcctcaattatctctactacctgccaatttcgttcttcggcaactttgctcaaatctctaatctggcggtcattgttctgctcgttggtggagactcgaacaaagagagcaacaggagtttttttcataagaaatttatatcaagagtactgaaaaaagcaataggtaaaaacagtacaataaaagattgttttctgccgcctcaatcgcctatttttcattctcaaaacagtaattttttctcatggccttttttcagtacattccaataggaaaagctgaaaggttttctccgtggattctgactttcctgctcatttagcaccacctaaaaaacaggaaatgccttttagagaggacaggtgtttttcatggggaaatgagttctgaattatatggatagctgggtataatagtgaagtttttgcggcacttatgagtcactaaggaattatgatttgcataaaacattgataacacgtaaacgaacaataactgtaaatctgttagcattcgctttcgaaggttcgaatccttctctacccaccacttttactttcataacgcgttctccggaagaacgcgttttttattgtttccgcggttgcgggttcgtgatgttcaacgggaaaaggggatcgccgccctgtaggagaagcaggaaacgagcatgcgcgcggaggatggggaggcggatgacttgttcagcctatcgacaaggcgcgcaggacatgttagatattctctcttgccgatttttcatctctgccgtttattgacatgttgaccacgctgctcattctgggagtatccgccgttttgttcgtccaggggagaatccgttcagatattgtcgcgctgtgttccctgctgtgcctgatcgtgttcgggattttaagcccggagcaggcgctttccggcttttccaactccatcgtagtcatgatggtggggcttttcgtggtggggggagccattttccggacgggactggccaagatgctgggcggcaggatcatgaagctggccggcaagagcgagctgcgcctgctggtgctgaccatgctcgttacggccggaatcggagcgtttgtcagcaatacgggaacggtggcgctgatgctgcccattctggtgagcctggccgcggacggcggcatccagacgagccgcctgcttatgcccatggcgtttgccagcagcatgggcggcatgctgacgctgatcggcacgccccccaacctggtcatcaacaaccagcttcaggaagcgggaatggaggggctgggctttttctcgttcacccccatcggcctcgtctgcatcgtgacgggcgtcctgctgctgattcccctgagcaggaagttcctgggccgtcatgacgacaagacggaacacgaggccaagggcaagtccctcagccagttgatagacgagtaccagatcatcagcaatctttaccgtctccgggtgctggaggattccgccctgacggagaaccccctgcacgacctccagataccggaccgctaccacgtgaacatcgtggaagtgcgccgcaggcattccagccggcattccttcctgcaaacggtcagccagaccatggcgggctcggacacccgggtggcgcggggagacgtcatttacgtgatgggggagtttgaggacgtggaccgtttcgcccgggaatacggggcggtgatgattaaccggaagacgtcggaagatacggattccctgctgaagagcaaattgaagtttgacgagataggcattgcggagatgctgctcatgcgcaactcggacctcatcaacatgcccgtgaagtcttccgggctccgcgccaagtacggggtcaacattctggccatccagcgggacaaccattacattttccacaatttgaaggatgtgaagctccagtacggggatacgctgctgattcagggaacctgggcggatattgcgcgcctgagtgagaaaacctttgaatgggtcgtggtgggccagccgctggcggaggcgtccaaggtgaccctgacgcacaaggcccccctggccgctggcatcatgctgctgatgattgcggccatggtgttcaactgggtgcccgcggtggccgcggtgctgatcgccgccgtcctgatggtgctgtgcggatgcctgcgcaacgtggaagaggcgtaccggacgatcaactgggagagcatcgtgctgattgccgccatgctgccgatgtccgtggcgctggagaagaccggcacctcggaggtcatctcccacggcctggtggccggcctggggggattcgggccgttcgccctgatggcgggcgtttatttcacggcctccctgctgaccatgttcatcagcaatacggccacggcggtgctgctggctcccatcgccctgcaatccgcggtgagcatgggcatcagcccctatccgctgctgctggcggtttccgtgggcaccagcatgtgttttgcctctcccttttccacgccgcccaatgccctggtcatgccggcgggcaagtacacgttcatggattacgtgaaggtaggggttcccctccaggtgatcatggggctggtcatggtggtggtgatccctctgtttttcccgtttgtgaaagcctaggccggagagccgttcacgaggcggaaagggcgcatggcagtgtaatttacatgcattactaaaaaaagagagacaagggaagcgcgtgggagtagaagaggattgtttaagaacccccatttaatgatgaagtacttgcttattattatggccgctgcgttcgccatgccctccatggcggaggaagacgctcccaagagaatgacttccgcggaaaagaaggccgccctccttgaaaagtatgataccaataaggacggcaagctggattccgaggagaagaccaagatgaaggaggacctgaagaagcagaaggaggaggaacgggccaggaagcacgcctcccgcaaatccgattaaggttttacggcttcgttgacaatctgtttttcagacggcttgaaccgggttcaggctggagggagaacgtatgtctgttaaagcgatgagatacggaatttggaccagatgggccgctgcggccgtgtttgcctccctggccgcatgtacggcggaagaatgggcgcagtttaacaaggagatggagcagaatcagcgggccgccgccgaacgccgggtcaaataccgcaagatcagggtccagtgctccgactgggagatggcggatacggctgccgcctccctctcgtccaagggattccgggtcatgtaccccggagaagacggctacggagccgtggcgaccgtcagcaagacggcgcaggagcatgtgctgattcgcaacgggaattatttcaccacgctgcccggtcccaatacgcggcccggctacaggacgaaggttaccgtgaccgtgcataatctggcgggcaggaagctggctgaataccagggggaaagcgttccttccgaatccttccaccgcatggaggcggcccggtccgcctgccgcaaggccatcggcaaaatgccgtccagcacttccatttactggtaggggggagttttggcccttatcctggggacggcagccgagctacactccggctccggtcccgcgcctgccgcgtgacctgattttataggccagcgtatccgccagctcccggagggcgttgagcgggtttttccgcaggacgtggcgccctttcagcgtggcgccgggccggacggttcccgttccccggtggttgtggatgacggcggctgtctgggcgaacatgttgtacttttccagcaccaggcgtctagcctcgcgaatggcgggaagccgcttttcatattccccgccgtccatggccttgcggataatttcaaaggctttttgcggatcgtccagggggatggggatgaagctttcctgcgggaagcattccgtcgccagcgggtccccggcgtaaaagggaagggtcatggcgacgaaggcgtcggacaatttttccgtccagtgatggggttccagatggttttccacgcacagatggtacttgtagccgtccatggcgacggttttgttttctatttcctgaatgccatgcccgaaccagtccagctccggcaggcggtccgccaggtagcgcgtgaggtcataacgcattttatgcatggtatgcgtgtgctgcttggcggaacagatggtggaaagcatcttggttttcgggaattccgtctggtccagaatctcctgcatgggcttgatgtacagccattccaggcatccgcggcccagggtatggttggggtgcgggaggtcccggacggagtgggtggtcagcacggtgccgaactggccggtgtatgcccggctgtagattttaatggaagggggttccaccgtgatcaggatggtctggtccgggggacagagcaggggttccgtttcatccttgatggtgcctatggagttcctggggaattcatcgtataccagcacccagtcataatccgtcatggcggcgtccgtgcagaacaggcagtcgccccacagcagggattccgttttatccggggaggccttggtggattttctgatgaccttgatgcgtatggggcgggaggaatccgtcatgggaatggaggcgttgaagcggcgcgcgggctttccgccgtacgtcgggcaacccgtccggaagcatcgcggcggcggcgctgcatgacgtcagtgtagggggccttccttccttgtcaatgtcaaaggattgggcgtttttccgtgcggagcttccgtcagttggacaccgtgctttccatccccggaaaaagctggtcgaggatgccggaaaccattttcctggaaccgtagggggaaaggtggttgtcgtcacagtacatcaggtgcccctcgtcttcttccagccaccgcccgtttttatggaaggcgccgtgcagcgggataaagcggcacaggcccgtggattccatgtgctccagcagggcgaatacggggcgctgccgcgtgatgaagtctccgcccagcaggcggtccgcgcggttggcgttcagcagcgcattgcgccgcatgagtttgcgcgggccgaaggtccattcaggcacgggacccagcagcacgatttgcttgccggccttgcgaaggcgtgcgcaggtgtggagcaggccgtccgcaaccagttgtttcaggcgcatgtcccggtggctgttgaccagttcaatccagcggttgtggatgaatacggtgtgtatctggggagtgttttccagccagtccagaatcaggtccatgttgtgctcccagtgcgggtacatcatgcgcagcagcgtgagggaatccgcgtctccggactcggaaatgccgctcagggggcatagccgcgcccggtagaacagacctgaccggttgaggagccgcgcggcgtcgtcaaagcccggagagctggccatggcatggctgtctcccataagcaggaaggaagggggctgcccggttttacccagcagtacaaagggatagtccgtcacgtctcccagctccggatgatggggctggatggcgtttcccttttccaccaccgcacggtcggggggcgtgatgccgaaggagggcgtgaaggccggccccttccagtattccgggaatgatatgttgttggcggccacgtgccagtagtcccgtgcgccgtccgtccatttgagccattctccggcaaaatccagcgtgaggcatcctgccgccgtgagcaggaacgcttttgcgggcttccgccatgcggcggctgtcctgaagggggtttccacgaatttccaggaaaggaaaccgagaagaagggagagaaggaacatgcccgcatagtcccgcggaccgcattcattgaagcagaagtaggtccagtacacgatgacgggccagtgccacaggtacagggagtaggagattttgccgatgcccgtgctgagcgggtgcctgaggatgcgcccggaccagccgtggcttccgtagcggatcagaagggccgcccccgcgacggaaggaatggccgtgtatcccggaaagggggtggaggaggaataacaggcaaaggggagcaggatgccggcccaccccgccagccgcagccagcgtattccccggccctgttccgtagcggcgggagccagggccaggagacagcctgccaggagttcccaggcgcggcagtgaagcaggtaaaaggccttgttatgctccagattccccatgtggtagacggcggcgaacagggagagcgccagggctccgcagagaacgggcttgacggcgtttttcctgaatttccagagcagccacagggcgagcggaatcgtcaggtagaattgctcctccacgctcagggaccacaggttcagcagcgggttttcttctgcggccgggctgaaatagtttcctgcggtcctgctgaaataaatgttggtgatgaagagggcgcttgacctcacggtgcgccccagggtccgcaggtcgtcgcaggccagcaccacgcacccgaaggccagcacgaccgcaatcaggcagaaataggcgggcatgatgcgcctgattctccggtagtaaaaggaggacagggagaagttcccttccttcaggctgcggacaaggccgccgccgatcaggtagccggagatgacgaagaagatgtccacgcccgtgtaccctcccgggcagatccgttcctgcaaatggtacaggacgacggccagcacggcaaaggtgcgcaggccgtcgatgtgcggaaagtaggttccgtgggcggcatttccggcctgctggagggaaggtgaacaaaagttttcagaaaggcatttgttcatgaggcggaaaggaggaaaatacagggatgggggagaaagtgaaaagggggagggagaagccgggatggagttgatttgtccgggagcctgggtcagcggctcaggcggttcttcagccgccgccatgccaggcgcagcctgtggccgcgttttaaaaagcgctggtagtaggcaatccatgtgccgtcccccttgcggcgcgcttcttccggagactggtcgaatatccggtagagtttggctgtttcacgttccgtttcttccaggaagagggcttcctgttccggggttttccaggggcgggacatgatttcacaccacaggccgtcgtcttcgtccactttcttcacgtaggccgcggcgtcgtccagggtggggaagtcgtggcagttgatgaacgcggcggagttgaattcccttccaatgtccggattgccccagtaaatggggatggtgcccgcaagcatgctggtgacgattttctcgctggtgtagccggggtaccaagcgttttcaaaggcaatggagaatttgtacggctttttcatccggatggaggaggcgtaccagtcttccgaccggtggccgtcgcccggcgtgttgttgaggtggggccccagggagttgacgaaccggacggaggagagcttgtgaaaaatggcgtcccggttgggatgggatttgcggttggcgtaaatgaagttgcagaagcccgttttggaggccaggagggcgcggacgtccaggcctgccttgccgccgtgcacttcctgcaaatggtggcgcaggaaggggagtttgacggtgcggtcgcttccgggcaccgcatccagcccgatgtagtagtcaaacagcatgaagtccggggcgatggcttcatggcagccgtacatgacggtgatatggccgggggcccgttccagaaaatcgtagaacgcttcccggttgacgtaaaaccagggggtggcgatcaggtagtcgaagtcggaatcgtcttccaccacgcggtaacggtctttcaggagctggtaaatgccttccctgccgaaatccggagtggactgtaaaaaggagattttaagcgttttcatgggagaaggcgggtcggagtggttgagagtgtatggggcggctctttcttgtcaatgacaaaggcaggggccggccgggcgtattgggggaaggttgcccggcggttaaacatcagcctttttcacccttcgcgccggtattcccggagcgtttcttcatacagggcggcgtgccgtgcggcaatgacggggtaggaaaacgtttgttcggcgtgttggcggccttcctccgccagggccagcaggagctttccgtcccggatgagccgttcgcagtggcctgccatttgatccaggtctccctggggagccaccagccctgtcctgccgtccaggaccacttccggaactccgcccgtccggaaggtgacggagggggtcttgcaggccatggattccagagctacgttggaaaggacgtcctgaagcgtgggattcaggaagatgtccgccgcgctgtaaagcccggccagcttgttcatgtccgtaatgaagccggcatttgtgctggggaaggggaattccacgttcttttcctggttgccgaagagcagcagatgaaggttcctgtgcccgcgccggtacagttcctccagcaccagggggatgaaatggcctcccttgaccggattgaacaggccggttgcgccgcaggcaatgacaaaggctccggacgggatgcccagggccgcacggatggcctcccggtcttccgccggacggaagaggtccgtatccacggggttgtaaatctggacaatccttcttccggggaacatgcagcctttttccacttcccttttcagccagagggagggcgtcaccagcgtcagggacggtatgcgggcgaaggagcggcgcttgcgggagaacagccacgccggaaggccgcggaagaggcggggagtgccgagctgggggcaactgccgcggcattcgtcccggaaccggtcgcagtccatggtgcagtggcaccccgcggtgcacgcaaacatgtcgtgcagcgtatagaccagcgggcggcggatgtggctcagccgcgtgaaatccaccgttcggccgcctatccagtgcaggtgcaccaggtcggctttctccatctgggaggtgtcgaaccccatgcccagcacgttcagggagaagggcaggtccctccttctttccggcagcagggcgtcaaatccatgcgccagatggcggcgcagcgcgtccgtagctcttctggcggcggatctgctgatttccaggccatctattcccttgcgcctcctgagcagaaggacggattccatatcggaaatattccggttcagggcatcattcaaccggtagggagcggagctggccgatacgctgtgggagacttggaatactgtcctgcgttgaggagaagtcacataggggagtatgaggatttggaatccggcgtcaagcctgcaaatctgaaagaaaaacgttttgggaagatttcgcttgccgttattccgtgaaccggcagacgctggccctgatgtcagggaggcttcttcttttaacaagaagcaggggaagctggctcacggaggggccgcggctgtgaaaggatattttgattgacggtgttttgcggctccggcgcctgggagcggaagatttctggctttaatagatataacccattgtatataatagtataaaataatattaaatagccgttgctgcgttccggaggcgataggtatcagggccgggaggccgtggctcccgggaggtacgcgaccatgaaagggagatggggagaatgttgatggagcagcaattggaccatcccggaggggggaaaaggagagcttttccgagctgtggcatccttaccggattccaaatccgccctttttggggggaagaagaagctgcctgcatttttgcagccagcctttttttgcggtccgcgggattcccatgtcgcgcctgtcctggaatggaaaggaggaaagctgttcccagtcttccgcataggtttccgtaccgtccagggcggtgatgccctgcagcttgcacaggatggagaagatgctctggtcataccggttttccacaaagcccggcaggttgggagaggcggagggagaattgtccgccaggtgcagatggtcgtaaaagacatggagccagtcccggatcaggttttccgtgaccgggttctttttcagaaagacgtgccctcccgcaatttgctgggtgtgcgtgacatggacgtcttccccggaaacgccgaagtggcgcaggatgtcccccttggtccatttgtattccggctgcccgttggtgaaaaccagcatgccgcggctgtcccggtccagcatgtccacgtattcccggaaacgcttcgctccgttaatgttgatatggcagcctgcatccaggtacaggaggcggtcgccttcccgcatgtcctgcaggacgtggtggatggaccagggtttccaggaccagtacccgaatccccggcaggacggcgtcaggtatttgcccatgcggccggtgaattccgcggaaagatcatgttccgtgaacagcgtgatctcatcgaaaaattccagcgcttccgcctgcctgcccagccgttccagggcggccgccatgcgggagtctgcgaatgagagaaagcggttcattggtccggaaggtagggataaggcaatttacagggaaggcggcgatgtgtcaaacggctcttccggcgaggcgtttttcccttggaaaccgttggaatgcgcttgggaaaaatgttccgcgagcattcttttgcaggagtaatagcgtcccttctgtccgggaagcagggaacaggccgccagcaggatgcggccccagccgttggatggcggctgcgccgagttcagcaggtccaccagttgcctgtcccggcccggcaggacggagaggaaccgagccccttccgcgttccggtagaacaggtgccaccagtccagcagggactgttgctgaacggcggtcatctggtggaaaagaggatgcttggaaacgaagaaaggcctgattttccgcacgccgtaggcgaacaggccttcattctgccatccgtgttccttccagtagtccacgatgtacagcagacgctggaattcctgtacgcatttgaagtaggtggggtcattgcagcggcgggaaagggaacccctccgcatgaggcggtagtaatacaggcagtccggaatgaacaggaggcgggaggcgtgggggacggccatcagccggaaggtttcatcctccgcgccggatttcaggttcacattgaagcggaggcggtgggcgtccagcatgcttttccggaacagcttgctccatacgcagatgtccattttcccccagatggagtcccggaagaagctggccggggaggcgtccttttcaaaatgccaggagggcgacctccttctggcctcaatgagccggtccgacgagtcctcgaagacatggttgccgcactccacgatgtccgcatcatgttccagggccgcggaaaaaaggcgggagtacatttccggggccacgtagtcgtccgggtccgcaaagccgacgtaaaggccccgcgccgcatccagccccgcgttccttgcggcggaaacgcccgcgttctgctggttcaggaggatgattctgccgtccttttccttccagcggagcaggtgcgcccaagtatcgtccatggagccgtcattgatgcagatgatttcaatgttccggagggtctgccgaaccaggctgtccagacagtcgtccacataagcggctacattgtagcagggaacgatgatggaaacgtcgggacgcataagcttataatgtatgtaacggatttacaatccgtggtcaatgataatttttgcaagataaatattaccgaaggtttttaacgttgtcagcatgaaaagaggggatgaaggccggggattccgcgggatgcgcggggattgcgttccaacggttttccgcgtggaccggccaggggttggagtatccggattgtaaattcgttgagaatttggagtccgggaacgcctcaaatggcagttgcctagggccgggtggatgtggtacaaaaggccgtacaacttcttcatttattcttctcttatgattattgtcacgggtggggccggcttcatcggctcaaacattgtcgccgctctggaaaaagccggtaaaaaggatcttgtggtggtggatgagctgggctcttccgacaagtggaaaaacatcgccaagagagagctgtgcgccgtgattcctccggaggacatgcttgactacatggaggcgcatgcggaggaaattgaggccgtcattcacatgggggccatttccgccaccacggagacggacgccgatctgatcatccggacgaatttcacgctgagctggcgcctgtgggagttctgcgccttgtacggcaagcagtttatttacgcctcctccgcggccacgtacggggacggctccatggggtttgacgatgactcctccctggagcacgtcaatgccctgcgccccctgaacgcgtacggctggagcaaggccctgtttgaccgcaaggtggcccgggaggtgaaggaagggcggccggttcccccccagtacgccgggctcaagtttttcaacgtgtacggccccaatgaataccacaagggggggcagaagagcgtggtggcccacattttcccccaggtgaaggtgaatgaaacggtgaagctgttcaagtcctaccatcccgactaccgggacggctggcagctccgggacttcgtgtgggtgggtgactgcgtgaacgtggtgctctggctgctggaccatccggaggtgagcggattgttcaatgtggggtccggggaggcgcgctccttctacgatctggcgaaggcggcattcaatgcgctggggctccaggaaaagatcgcctaccgggagatgcctgaagaactcaagggcaagtaccagtattatacgcaggcggacctttccaggctgcgcgccgccggctatgcagctccgatgacttccctggaggacggcgtgcgccagtacgtgcagaagtatctggacagggaggacagctacgtttaacccgcattcctttttccgcccatgtccgcacagcgcattctgatgatcaagcacggcgcccttggcgacgtggtgcttgccatggggacgatgaagcggctccgggagctccatccggaggcgcatatcaccctgatgaccatggggatgtttgttcccatggcggaacagctcggggtgtttgacgatttcattgtagacaaccgcctgccctaccggaagctgggcgccacgtggggggccatccgttccatcgtgaaagggaattttgacgtggtgtatgacctccaggagtcttcccgcaccaggaagcgttattatcccgccgtccgcttcctgctggaccatgacatggactgggtggcctgcaattccggggaacggcgaaggctgctgaaaaaaggcggcttccggtttggcagggtggtgaaggagccgttccacctggaacgcgtcctgacggacctttctttcatgcacggggaagggctgcattttgacgagcttccggaacgctacgtgatgatgattccgggctgttcccccagccatccctacaagcgctggcccgtggagaatttttgcgccctggcccggcgcctggcggaaaggggcatttcctccgtcgtgatcggcacccgggcggaggccgcggaggtggaggccattgccgccagctcccccctggccgtcagttttctgggcaagtccaccctgatggatattccccagatggcgctccgttccctggcctgtgtgggcaatgatacggggcctacgcacatgtgcgcctatgccggggtcccggtgaccgctattttctgccaccggacgcgcaagtccgccattacggcccggtgcatttccaacctgatttcccccggcgccattgaggaaattacggtggaccaggcgtggtccacgctggagcccttcctgcccccgcgggaagagcttgaacctgcaaaaatggcggctactccgcaggcgtcatgacggctcccgtgaaaatttccgtgctggttccggtttacaatgtggagccgtatctggcccagtgcctggaaagcatctgcgcacagacgctccgggagctggaagtggtttgcgtggacgacgcttccacggacggctccctgtccatcctgcgggagtttgcggagcgggaccagcgggtaaaagtggtgcaggccccggaaaacggcggcctttcccgcacccggaacctggcgatgagccatgcgcagggagaatacctggtgctggtggattcagacgactggctggaaacggatttgctggaggagatgtacagccgtgcgaaggcgctggacgccgacaagctggtgtgcgggttccggtattattatgagtccgaccccggaagggaggaccggttcctgccggaggacatcgcgccccccggaaagggatggattccctgtacgccggaaaccatcggtaaaatacaccatggagcgggcggcatgatgatacggcgttccgttgtggaggagcatggcatccggttccccgagggcgttgcctgcgaggacctgtatttccactatgccgcctttccgcggtgcagaagggtgtgtgtggtcagcagggcggcatacgtttaccgcaagcgcgccgggtccatcaccagcggctttgcgtccggcagttcccttcagtcgctggattacctgacggtggcgcaactggtgctggaagagtggaaacgagccggaatcctggaggaatacagggcggcttttctgaaaatgctggtgatgggcgtgcggaatatccgcaagtacgccccccatgccgtccagaaagaggtcacccggaaagtgtcccgaatgctccgtgaagaaaacctgtaccgtccgggagaggaggattcccgcctgtcccgccgggaagaaaaactgctgaaaacctggctggccggaaaatccggcttggacttttcctattactggaagagaatgcgcaaagcgggcgcccggctgctgcgccgctgacaccacccgaacgatcgaccgatgaagaagaatgaatttgccgtcgtcctggccagtgacaaccggggcatcctgcctttgagcgttaccgtcttttccctgctgagcaccgctgctccggaaaccttttacaagatttacatcctttccgacggcattgacggggagaaccggaacagcgttgagcgcctggcggccccatttgagtgccggttggagttcatagacgtttccggcatcctggaagagcacgactttccccatacggaacagtggcccgtgcccgcctggggccgcgtgttcatcccggagttattgaaggaggagcggggcaacatcctgtatctggacattgacgttctggtttgccgggatttgacggagctgttccggacggatatgtccgggaaggcggtgggagtggtgtttgagaatttttccaggcccggctcccatttcaacgaacgcctggagatgccgctgacctgcacggggtatttcaattccggcgtgctgctgatgaatgtggacgtattccgggaaaagaacctggtcagggccgtgctggattatgccgtcagccaccgggacaggctgacctgcccggaccaggacgcgctgaacggcgccctgtgcgagctgaccgtgccgctgcatccgcgctggaactggcatgacggcctgacgcgccgcatcctgaagaacgaccccagggaacggttttggcgaggagtgacgccgcgccaggcggtggaagcggcgctggaaccgggcattctgcattaccagggggtgcacaagccctggcggtataattggcgctatgaaggggaacgttacgaacgcgccatgcgtgaagccgggctgctgcatggcccgctgcccggaagaaccctcccggccatcctgaaaaagcacctttaccggcctgtttaccggatgaccaggaataaaattctcaggctgcaaaagcagtttgagaaggaggatggcacatgctcctgaagccggatgcgggttaatgtgcctgttttattctgtactggatatcacgtaagaccgcccggtaatacttctcgtaatccgtacctttcgcgttttttccgggaggcgtgggcgaagaagagcaaacctccacatcaaattcttccagaagggctttcatggctttggcgggctggccgtagaaaacgatgcggttttggatgtagcgcgccctttttggatcgcgcagccatcgtgaccggaggttcaggatgtaaagcaggtctatttcttccgaagaaagattcagccccatgatgtaaacgttggaaaagaaaaacaggtcaatccatgattcctccagttgaagctgcggcttgcgcagcttttccgggatgcccgctatttcttttttctgtttttggacccagtaagtgtaggttccctttaaatagctgtcaattttaccgatgcagccgcaatagtgctcatacccgtattgaatcgtgaaggaggagggtttttcattataggtgccgtgaatgttccagatgcggagggagcggcgttccttttccatgcagacatggcggcggatgctgtatttggtttccgaatttcggcgctggcttgtcctgtaatgctgtgattccaggatctgcaccaggaacgtgtcgtaattggtggtcagatagtcgtctattggaagggcggcaagctggtgtaaaacggagccgggatatttctgcggggtgaactcttccagtttcttcttgagccggtcacgcacatcggaggatactttgcccatgtcggcttccggatgccgtttttgttttttcaggatcaaatactcgtaaatcaggggaaaaggcagatagtccccctggtccctgaacgggcaatagatatcttgcttgcagccttcaccgccgttgcagggagggcagacggtttccttgagcaggtcaatgctgcttgggcttcccagtgtgcggatcaaaccgttgccaaacaggacggcgttctttctgagagtggatttggtattggtggaaggagtcatcatggaaaacagcggaaccattctccatgctggtccatggccgcgaaaaatcaagaaacaaagaaaaatccttttcccgccgccgtcttgtccggcatgaaaagggctgccggcgtcagtgcagttccagcagatagatctccggagggcagttgaagcggagggggagcgtgctggttcccagccccttggtaatcaggtaggtgttgccgccggaaatatgccagggataggtgtagggctgggcgtgttccgggctggcttcaaaccacaggaggttgaagggaaggcgtatctggccgccgtgggtatggccgctgatgacgatgtccgcgtccccatgggaaagcatgtgatccgcttccggacggtgggaaagcaggaaatgggggatatccggggactggcgcttggggagccgttttttggaattgcgcgaggtgtccagcattccggatagctggagctgcctgccgtccttgaacgtgacaagcgcgctttggtcttccagcaccgtgatgccggcccgggtcagttccttgcgccagttgtcccagccgaaggtgaagtcatggttcccctggatggcgaagacgccgcagggcgctgccagcccccgcagcagccgggcggccgcggcggggctcatgctggcgtttctgctggcgccgcgggcataatcccctaccagcaggatcaagtccggctgaagctgcatgattctccggacgtagcgcagcgccctcacttcatcaaaggccgtgggcatcaggtgaaggtctccggcaatgacgactttaacgggttttccgcggccgttccactgggggacgcggtagtccaccttccggacgaacagaagattgggttctatcaggtacgcccaggtaatgccggctacgccgagcgcgcagacgcccagcagcagggtgccgaaaagccggagtattctgacggagaagggcatggaagagaagcggcttggcagagactataattcctgaggaccgcaggcgagcgatttatgcgtcttgccatttgagaaaggcccgtttgcggggagaagcaggcggaaaggcgcccccttgggagattttagcaaatttgattgacgggcgcccgcatggtatgcttttatgctccaagatatttccatatcctttatcacccatcatttaaccacgcatatgaagaagattaccgttatggctcttgccgcttttgcggcgagcatcatggcttcctgctgctgtcaggatcagggtgctccccccctgaccccccttcccaagttcaatgacctgaaccagcccgccgtggatgtggctccggtggtcatgaagtccaagaagtaatcctcttccgggattaggtacgacttttcaagccgcacttggtgattgtccaagtgcggctttttctataaaaatgcggcagaacatatggaagattggaaacattgtcccgaatttgcgcctttggcggacctgttccgcagacatgacagctttgcggtaattgcgcacgtgcatccggacggtgacgccatcggttccacgctggcgctgggggaagccctgaagcagatgggcaagaaggtggtgatgatgaacgaggacggcgtgccttccaatctggcctttatgccgggcgtggaaaatatcatccccacgcccgatgagccggtggacgtggaagtggccgtttccgtggacaacggcgcgttcaagaggctgggcgaacgcagtctgaaggccctggcgggagtgaaggtgtgggcgaacatcgaccaccaccagactaatgaattgttcggggacgtgcaatgcgtcctgccggacgagtgcgccacgggtgcggtgctgtattattttttcaagtatctgggcgttcccgttaccccggtgatgcgtgacgccctatacgtggccgttagcacggatacgggttccttccagtaccagatgacgacggcggccgtgatggagctggccgcggatttgatccggatgggcgttgacgtccaggacatcaaccgccagctttaccaggaaaagccctgggtgaagatgcagctgatgcgcgaggcgctgaacggcatgaggctgacgccggacggcaggatttgcacgttctgcctgacgaatgaggcgaaggcacggatcggcagccgtccggaggacacggaaggcctgatcgaccttttgcgttccgtgcagggggtctggctggccgcttatctggaggaggcggaggacgatccccgcatccgcatttccctgaggtccaagacccctgaaatatccgtggcggagcttgcctcccgttttggaggcggcggacatgccatggccgccggagtgcgcatcaggggacccattgaagaagtgcgcctcaccatcctgaaggccatgcaggaggaagtggaacgcgtgctccaacagcagatttcatgaacgcttcagattccatgcaagctccctcgggcgtcctgttgattgacaaggcgcaggacatgacctcccacgacgtggtggcgattgcgcgccgctccctggggattaagaagatcggccactgcggcacgctggaccccatggctacggggctgctgatgctggtggtgggaaaggcgaccaagcttcaggacaagctgatgtgcgaacacaaggaatacgccggaaccctgacgctgggagtggaaacctcttcccaggacgccatgggggaagtggtggcggagtattccgtggacggcgtgacggaacaggccgtgcgcgaggcgtttgaccggtttgacggcgcttttgagcagattcccccgatggtttccgccattaaaaaagacggcgtcccgctgtacaagctggcccgcaaggggcaggaagttgtgcgggagccgcggcccgtggaggtgttcggccatcaaatttcccgcgtggccgttccggaagtggactttaccgttcaatgctccaagggtttttacgtgcgttcctatgcgtatgacatcgggaaggcgctgggctgcggagcgcatttgagcgccctccggcgcaccaggtccggctcttttacgctggagcgcgccgttacggtggataccctgaaaaccgcccccagggaggagctgttccgggccatgctttccctggaggagctggcggacattctgattgccaggtagcagcatggtcatttaccgggagttcaaggaactgaagggtgtttcttcccccgtgcactgggccatggggatgtttgacgggctgcacctggggcatgccggagtgattgccgcagcggtggaaggcgcggcccgtgacggaggcattgccgccgtgctgacgttccgcactcatccgctggcccgtgtccgcccggaaagtgtgccgcctgccattatggcggtgaatgcggaaaagttcgccctgatggaagagctgggggtgaagatggtgctgacgctggaattttcctcccggctggcttccatgagcccggaggaattcatcagggagctctgcgcctcctgccgcgtggcggagattgccgtgggggaagactggcactttggccgaggccgtgcgggcgatgtggaaaccctgcgccttttgtccggccgctacgggttccgggtgacggccgttccgcccatcctgcgggacggggagcgcgtgagcagcacccggattcgcgaagccgtgcgtgcggcggattttttacaggcggccggcatgctgggccgtccctaccgctggaggggcccggtgattcatgggcgccaattgggacgcctgctggactaccccacggccaatatgaagcccggctgcgggttgcagcctcctcatggcgtttacgccgtacgcgcccgggtgaacggggcggaatatgggggcgtcgccaacctgggggtgcgtcccacggtggagggggatgcgggggaactgttgctggaaacgcatttattcggccggacgggggacatttacgggcaggaaatggaagtggagccggtccggttcctgaggccggaggccaaattcccctctttggaagaactgaaaaaccagcttgcccgggacgccgcccatgccgctgaagtgttgaaacggggtgagtaagacacagaaaaccgtaaaatggaggatgacggcttgaccgaaagagcgatcgggggtttgttgttcggacgtcatgttggttgagcagttaaaatcaaaaatccatcgcgccatgattacccgtggcgatgttcaatatgaaggcagtattgaaattcctgccgatttgatggccgctgtggacctgtggcccggagaaaaggtcctcgtggcgtccgtcacgtccggaaaccgtctggaaacgtatgccctgcaggggcctgccggtacggggaacatcatcatgaacggcggcgcggcccatttgatcaagacgggcgaacgggtggttatcatgagctttgccctgtcggacaagcccatcgttcccaagaaaatcgtttgcaacgagcataacgaaatcatttcctagactttacaaaccatctgaattcacacatactccccgcgttcatgaacctttttttagcaaattcacttaatatcagcattcagttactctttgccgttctggtgattgtgtcacttctcctcctgggcgtggtgcttatgcagagacccaagcaggaagggctgggagccgctttcggcgccgccatcacggaccaggccttcggcgcgcggactacggatgtgctgaaaaaagctacggtgtacttcggctccgccttcatgattctttgcctggtgctgggcatgctgatcaaccgccagcacgtcaagagctcggaaagcctgctgagcccggaaatgatgaaggccgccgccaagcaggaagcctccgttcccgccaagacgccggaagaactccagcaggaggagctgcgcaggcgcgccgctgaggcggaagccgcttcttcacaggctccggctcccgctgtgccggaagctcccgctcctgtctctccggaagctcccgctcccgctaattaaaagaatgttctttttaaacgccccggccgtcctccgacagccggggcgtttgcatgccggggccatgcgccgcatgtttgccgctccggaaacgcgctttgaaattggcggttccggttgttttccgcttgccctgaactgtaattgcgctactcttggcaaagtatgaaggcaccttttttgaaccgtaaatccaagggattcacgttgattgaattgcttgtggtgatcgccattatcctgacgctggccggcattgccatgacggtggtgaacggcgtgatggaaaaatcacgggttaccacggcgcggagcgattgcaacggtttgcagacagccgttgagaattacatgctggacaacggccgcgttcccgtagcctggagcggacgggaaatggccaagcaggcccgcaaggacgggcagtattacatgacgaccgccgtggacgacgacagccgcatcatgagcatcctgaccaactacatggaccgcggggatgaagacaggaagctgaatcccaagaaaacggcctatttcaacaccacgaccacggatgtggaaggttctcccggcctgttctttgaaagccgtggccgcgtgggcctgatggacccgtgggaatccccctaccacatcattttgaatgccaatcccgacgaccgcaccccccgcgtccaggtcggttcccgcatggtgaccaagaacgtggccgtttacagcgtcggcaaggacaagcagggcagcacggaggatggccacatcaacaatccggaaatgacggaagacaacgtgacttcctggtaacgcattccggaaccgcctgttgagaggcgggaccgatttattttgcggggcttccggcttatggccgcgaggccccgcgatatattcaggcatattgcctccaaaccgtatttttttcttttcaaccactctcaaaaacccctcaataagtcccagacatgaactggttcaaaacagacgacgtacgcattcaagacatcgagcccctgatttcccccgccatcctgatcaaggattatccggcgaccacggaaatcgccaaaatggtggctacgacccgcaagaatgcggagaacatcatttccggccacgacgaccgcctgctggtggtggtggggccgtgctccatccatgatccccaggccgcagtggactatgcctcccgcctgaaggagcagatggcgcgctttgaaaaggatctggtgatcatcatgcgcgtgtattttgaaaaaccccgcaccacggtgggctggaagggcctcatcaatgacccgttcatgaaccatacctttgacatcaaccgcggcctccacatggcccgcgggctgttgctgcgcctgggtgacatggggattcccgccgccacggagttcctggacaccatcaccccgcaatatatcgcggacctgattacgtggggagccattggcgcgcgcaccacggaaagccaggtgcaccgtgaactggcctccgggctttccatgcccgtgggattcaagaacggcaccagcggcagtctccagattgccgtggacgccatcatttcctcctcctgcccgcactgcttcctttccgtgaccaagcagggcgtttccgccatcgtttccaccacgggcaacaaatcctgccacctgattctgcgcggttcctccctgggcccgaatttcgatgacgaacatgtgaaggaagcagcggaagccttgcagaaggccggcatcaacaaccgcattatggtggactgctcccacggcaacagctgcaaggattaccgcaaacagccggcggtggccgccagcatcgcggaacagatttccgacggttccgaccaggtggtggctgtgatgattgagagcaacatcgtggaaggggcccagccgctgagctccgacctggtgtacggcaagagcatcacggaccagtgcatcggctgggacagtacggtggaagtgctggaaaaccttgccggcgccgtccgcaagcgccgcgccaaacggcaggaagcgtaaggcttccggtattgccggaagacagtttccaaggattggaaatcagggccactttatgggtaattgagcccggaaaccgcagttctaatccttcatatccggttgcttttcattggtcctccggcgtttttgccggagggtcaatggtcgtcgccccacaggtaggaatggcgttcggagattgttttgccgtggttgtccttcaggacgagcttccatgcgagaatctccccttttgttttggcttcatccccgatgaattcaaaaacggaattttgcgtgcctccctttctcccggcagggtaggaaatggattttgtcaggacggctgaacctgtttttccctgtcggtacatcatgaccagggtggccgcctgttccgggttcgcatcattccaggtgacgaagtagtattggcccagacgctggaggcgctgttgctgggagacggcgccgtgcagcaggtaagtagcctgggagcggtgcatgcctacatcttctgcaggaaccaccgtggttttcaagggaacctcccgcacatgttcaatccgggaaacctgctccgcacaggaaaacaggaccggcagtacggcggcagtgcaaaggggagcaggaaacttcatggagcccattcaatacacatccgccgggggagtcaacacaaaggtgggaaagcttcagcatggaaatgtggtggggcccagaaagaataaaggcgttccaggactggaatggttctgctgatggagtatccaacaagggaaccgcatccatgaacgggaaaggttccggaagcacggagctggcccgtttgactgccccgtgtcccagccgggcgatgacgctgccgcgccgcctttaatacaacggtacgaccagtgaggaacccagagccagccagcagggcagcgtaaggaaggaagccacggtagtggtcagcaggatttgggtgcccaggtcgggatggccgccgaagcgtttggccagaatgaccgggatgacggcggagggaatcgccgcctggatgatgatgacgcgcttgatatagtcgtccaccggcaggaaataggccatcaggagcagcagagccggagccagtcccaggcgcgtcagcagcccgcagatgatgggtttgggctcccacttcatgttgtgccacaggtctctcatggaacagccgaacaggatcaggcacaggggcgtggcgcagttgccgatcatttcaaaggttttcatgagaggcggctgggctacataggttcccaggccggaccaggcgagcgccaggcccacgatgaccgccagcagggggccgcggaagaagacgcccatgttcaggttgcccggaccgcctgcgatgatgatgacgccgatgctccatacgaccagttcgcaccccacgttgtggacgaaaaggacgcccagcgtggggtcattgctggccgtgaacagcatctggataatgggaatgacgaaaaaggcgtagttctgcacccccgccgtcagggtgaaggtgcgcaggcccgtgccgatgcgcatgcgcagcattttggcgaccagccatgcggacgcgatgcccagcagaagttccagcgctccggctccaatagcctggagggaaaaggaaacgctgctgagcgtttcattcccggagagcaccatgtacttcatgatgctgtggaagacgaggcagggataggccacatccatcgcgatgcgcatgatgggcgcgtcatggtccgcctggatgacctgcttgtggcgcagatagaaacccgtggcgaagaaaagataaacgggaatggtggagaggaaggaagtgagaatgatggaaccggtgtccatggcggcaggattgcagggcgcgattgattaaggcaaataaaaaagcggaacaggttatgtgttttcccgcgtccggagcaggaaatgcgacaggtccctgatgctgaaaaatacatttgaagggttggcttcttccaggccgcggatgtccgcggtagttccccaggcggcggacaggcaggtcacgcccgctttcctgcaggcggttacatccgataccgcatccccgacgtaataaaattcatcctttgccaagtggcagtcatgcagcagttccccaatggcttcctccttgttcggcctgtcttccgcaccggtcttgacagagcagaacagatcctgcatgccgaattgttcaagcgtgatgcggcagctcttttctccttttccggtaatcagggcaaccaatattccctcctttttcaaggtgttgatcaattcgcgaatgccttcatacggttccgggcattcctcatgcatcttttcataaaccgggtaaaaatcatgaagggcttcctgccatttttccccggcgaccattttgatcattcctacttcattcaggccgaaggtctgcgtaatttcccgttcgctcagcgtacggcccgcgtagggggaaactgctttttcaaacgcccggatgcacatggggaccgtctcccctatcgtcccgtccaggtcaaaagcgatcagtttaatcattgttcgcgattcccgttgattttacggataaccctgcaggggtttcccgctgccaggctgtcggggggaatgtttttggtgaccacgcttccggcgccgatgacgctgccttttccgatcgtgattcccggcaggatgatgacgccgccgccaatccagcagccgtcttctatcgtcaccggaagggcgaaggtatggcgaatgtattccatgccctccgccgtttccacgggagtgaggcgctcattcagctcaatggggtgcgtagcggtgtaaatctgcacattgggagcgatgagcacattgctgccgatggtgatcctgttgcagtccacgaacgtgcagcccgtattgacggtgacgttgttcccgatgtggatgttgcgcccgtagtcgcaggtgaaggaatgaccgatggatactttggcgccgatgctgcccagcatttccttcaacacctggcgcttttcctccttatggtcgtaaggcagggaattgtacttcatcaggagccggtgggtcttgctcttgaattccagaaataccgggtcatggcagtcataccattcgcccgccatgcatttttccagttcagtcattgtctttttccctttgttgttgattatggactgtggcagccattctgccgagcgatcgtgaatgaatgctcattttgcagggtatgcagatgctttcaagctaaatgacatgggatacttgtccctgttgcagctatacgcatatagccctttctttgaagaagaagcctgcatatttccagaatcataaaagttttcagcatgttcattaaaatattcaatgtgcagaccggccctcgtcaatgaattaataatatccgaaaccgtatgcatccagaaataggattttacgccatctttcggttcacaggcgtatccgccgatggaactatccacagagggaattttactgaaataggggtatttaatctcgaaaacttccttgtccagtttgctctcatcaaaggaaagaaaaaatgggtgtgaatcaaatacatacaaatagccgttatcctttaaaaggctgcgaatggtattcgcccatacattcaaatcgggaagccatcccaatactccctccgaggtaaagacaatatcgtatttttcaccatgaacttttgataaagtcatgatgtcggcttcaatgaattttacgtttttaaaattaagatcgccggcaagtttatttgcaaaaaatatgttgtcaggaactaaatctaccccgaccacgcttttagctgttttggcaagtatcaatgtatctgcaccggtattacactgtaaatggattatttccttgcctgatatgtcacccagttcttcctgtatataatggttcaagtgaagattatcatcacttagtaaagctttaaagtgatgataatgctcttctgatattttaccccaagcctgcttgttagattcaatttcaatcatgcaatattgccttcttgttattataaataccttttttactcctccatcgcaggaagtgatatacgatgctattctgcaaattaccagcagggagcagcggtgcaccgccccttgccattggcaaggaacggtgcctgcgctttgtggcaaacaaaaggttaaggataaactaaactttaacctcgctgggtttatcctctcgccatgcaatagagatcgaaagacctgtattcatgggactttacagcctcccttttaggagcggtatagtattactcccactcaatggaggccgggggcttggtggaaatatcgtaaaggacgcggttgatgcccttcacttcattgaggatgcggttgctggtttcacgcagcagggccgggggcagttctacccagtccgccgtcatggcgtcttccgacacgatggcgcgcaggttggtggcccattcataggaacgttcatctcccttcacgcccaccgttttcaccgggatgaggccggcgtaggcctgccagaccttttcataccagccgtatttcttcaggttgccgatgaagatggcgtcacactcccggatgatgtccaggcggtccctggtgactacgccggggcagcgcacggccaggccggggccggggaaggggtggcgccacaggatgtcgtgcgggatgcccatggaggcgcccagttcgcgcacctcgtccttgaacaattccgccaggggttccagcaccttcccctgcgcctggagttccagcacgcgctccacgcggttgtggtgtgtcttgatgacggaggccttggacttggcgttggaggcgctttcaatcacgtccggataaagggtgccctgggcgagcatttccgcgtctcccacagcgtcccagaatacgtcgatgaacaggccgccgatgatgcggcgcttcttttccgggtcgccttccccggccagggccgtcaggaagcgttcggaagcgtccaccgtttcaatttccacgttcatgcgggcgaaattggcgcgtacctcatcggcctcattcttgcgaagcagaccgttgtccacgaaaatggcgcgcatgttcacgcctgcctcatgcagcaggacggccagcacggtgctgtccacgccgccggagacgccgcagaccacctgcttgttgcccacgcgttcccggatttcccggatgagctgccttttgaagtcgccgatatcgaatttcttgaggttggcggcgcaggagaggaagttgcgcaggatggtgcgcccttcatgggaatgggtcacttccggatggaactggatgccgaaagttgcttctccccactggagggagacggggacgccttctgcgttgcgggcgatcacctggcagccttccgccaggtggtccaccgtatccgaatggctcatccatacctgggaggagggggacatgtcccggtacaggcccgtgcaggcttccggaagcagggcggcggggccgtattcccgcttgttgctggccttgacggaaccgccgtgcttgatgttcagcaattgcatgccgtagcacacgcccaggacggggacgttcaggcttttgagccattcaaagtcaatatccggggcgtctgcgtccgtggtgcttttggggcctccggaaaggatgacggcgccgggttcgtgaatctggtccaggtcttccagcgcgtacagtttggccatgtagcccagttcgcgcacgcggcgcacaatgagctgggtgtattgggagccgaagtcaatgacggctacgaggtgcttgtcgtccatgtgagagagggtttaacaggaatagttgatgggttcttccgtgatggtgatgtcgtggggatggctttccttcaggccgccggaggtaatttggacgaaccgggccttgtcccggagctccgtcaggctgtgtgcgcccaggtagcccatgccggaacgcaggccgcccatgagctggaagaccacgtccgccagcatgcccttgtacggaacgcgcgcttccacgccttccgcaacgagcttgccggagctgttctgcccgtagcggtcgccggagccgcggcgcatcgcgcccagggaacccatgccgcggtactgcttgaagtggcggccctgatagtggaccaccttgccggggctttcttccgtgccggccagcaggccgcccagcatcaccaggtcagcgccggcggccagggctttcacgatgtccccggaatagcggatgccgccgtctgcaataacggtgacgcccgcgggacgcgctacggaggctacctcctgaatggcggtgaactggggcatgcctacgccggaaatgacgcgggtggtgcagatggagccggggcccacgcccaccttgatggcctgcacgcccgccttgatgaggtcggaggctccttccgccgtcaccacgttgccggccacgatggggcggtccgtcagcttgcggaggttggaaaccacgtccatgacgcgggtggtgtggccggtggcagcgtcaatgaacagggcgtccgctccggcggaaaccagcgccttggcgcggtccaggtaatcagggcccacgcccacggcggcgccgcagcgcaggtggccgtgctcgtctttggaagcgtctgcaaacatggcgcgcttctggatgtccgtttccgtgatgaggccggccagcacgccgttttcatccaccaggggaagcttttcaatgcggtgggtgtaaagaatgtggcgcgcttcctcaatggtggtggtgggagccgccgtaatcaggcgggaaaggggggtcatcacgtccttgacccggatgttctggtaatcgtccacgccgcgcatgtcgcgtccggtgacgatgccttccagcctgcggttggcgtccaccacggggaagccggagtaaccctggtccatcatgatctgatggacttcttccagcgtcatgtccttgttcaccgtgacggggttcggtatgaccgcgttttcaaaacgcttcacgcgggaaaccatggccgcctggatgtcgatgggattattgcggtgaatgacggccaggccgccttcccgtgccagggcaatcgccagttccgattcggaaacggtatccatggctgcggacagcacgggaattttcatgtcaaaaccgggaacaagctgggaactgatgtccgcatcaccgggaagaattgcgctcaggcggggcagcaggagcacgtcatcaaaacttaatccaagagggagatctgccatgcgataatctacagccagacaccctctgacgcaagccgaaacacaggggaatcttattttggggcggcacggcggcgttctgcgctttgctccctgcgttgtcccggcgtgtgtctgttttccgtacaggaaactcttccctcttgatccggggaaacgtcttgcctatcctgaaaaaaagaattgtccctcatgaatgcttccgaaccctaccgagtcctgtttgtctgcctgggcaacatctgccgttctcccgcggcggaaatcatttttaagaagatggtgaaggaacaaggtttggaaaacctgattgaaagcgattccgccggaatgatcggctaccaccggggctgccctccggatgcccggatggtccaggccctggaaaaatacggttatcagaatccgggagtcaaatcacgccccgtgcggaaggatgatctggagcagttcgacctggttgtgggaatggaccgggagaatctgcgggatttgaaacagctggataaaaacgggcaatgggaaggcaagatcgtgccgatgtgctttttcaccacccgttttctggatgaggaagtgccggatccctactatggagggcaggaaggttttgagcacgtagtagagcttctggaagacggttgtttccatttgctgaaagaattggaaaagaggctgaacgtataaaaagcggcagtcatgccggagtggcctgtccgtttgacctggcagccttttccagggcacaggaagggatggttcatgccggttcgttcggactccgttgattgtcaacggaaatttgataggtgatttgccttggggctaccgtaaacctctttttgccaaaaaatccatcaagtaggaatggatagtctccggtggctaatattccggaaaaagagaaaagacgaccatggtacggcaacggatggaattggcgcagaagctgccatttttttgttccggctgaaaatgcaagatggatgtccaatccatatttcaagaataaaataatgtatgacaaataaaaacttctaagggattgcttcatggaaatttagttgataaaagggaaacgttaaataaggaaatttacttcagatatttcctgaatagagcaaaatattttaaaataaccaacgattaacccgattatcactatgaaagaatcattcaacgacgatattaattccctgacgggaatgcgcagttccaacagcgcgcccaccacgattgacgaaaaagcgccaacggacgcttttgaaaaaagctgggactggtcctttgaggtccgggaactgcgaccgaatgaaacggccgagtgcaaggtaaccatgggagccgacgatttggcgaagctgacggtggacggagaagaaaagttggacatcggtccgcgcggcgaatacggcggcggcacctacgaaccgcaggacatctccttcagtattgaaccgggtacgcaccaggcccacgtggattacagcaacatctctattcccaatcccgactacaacattgccaaattcaccttcgacctgaaggtggaaatcaccgaccagcagacgggctcctcttcttcctacgtgcctccggagacggaaacggaccctgtggacaatgacgacgagggcgaagaagatccctgtggaggaacgagcagcggtggcagcagcagttcccccaacagcagttccagcaacccgtgcccggacgatgacaacggcggagatgaggaagaccccgatcctgaagtttcctcttcctcggacggttgtgcggacaaccggggcggctccggcagtccgcccacggcgcgcagcctggcttcatccgcctccgtggatggaaagttctcctccgcaggcaggcgggtgactacccagacgcggaaaaccagcatggtctggcgcaccaacttcggctccttccgcggcatggagggtgtgccgtacggcatgctggaaatcgtggcttacaacttctcatccaagttgtgggcacccggcgccctgcaatatttgcatccaatggccagccgcgttctgcctcctcccggaggtgcgctgggggctaacatggccttccagatccagaacggcggcaccaatgccaactattattgctatgccggcgcagccagtgcgggctccatcggcggttctcaaaaaaggacaggttccgtttccatggcatatgccggggtatccggccgcgccgcttccgcctatgcggcggaaatgagggtcagcaacggcaggggcaatacggtcatgtacggcggtccttccgtttccgccctgggggcggcctccggctaccagaccaaactgggttcttcctggacggcgcaggatttttccaagtatctggacgttgtccggggcgctgacgacggcatccgccaggtctggaacctgtgggatggtctcgtcaacattgaaaatgtggtggatacgggctacatgatcgccttctatctgcccgagcaggtgagggccaaggacgccgccaccggtctttactccgtcacggggacgccgtttaaaaccttcaccattgccggcgatgcggaaaccaacaagctcaccgttacggaacaaacggaagggcgtgcgccttacgtcacgtgctactggcagggaacgggaggggcgtggtgcatgtcccagggggaaggggaagacgccatctacaccatcagggaaaagcaggcggtctccttcggtctctggaagctcatcactactgtgcagcgcggggaaaacggcacgcctatttcccggatgtgtgaaacctatgaacagggccgcagcggcaacctgtgcaccagccgtattgaggcctatggaaccgactatgcccgtgaaacgacttatgcttacaacgccatgggcaaactggtccgggaaacggctcccgacgggagcgtgaagacctggtcctacgacgccttcgggcgtgaaactgtccggatggaaccttggtcaggcggaggaaggaagggaacctacacctactatcgctactccgaccatgccgatccggatatcatgcaccagtacgtggtgctcaccatcaatgctgcccggctgacggacacgcactacacctactctgaagccaaccatgtgcgccgtgtggaaaaacgcaccacggcgttgggtgcggagggagaacagctggaagtgacggaaacgtggctgcccacggcgcccaatgaatacgcccggggacggttgaagatgaaacaggccgtcaacggcatgcagacggcctgcagctatgaggcgtccagccagtacggcgccctttacaaggaaaccagggaaacgcagatagcggggcaggccgtgccggggcacagcacgcggaaaatcacgtacgtctccacgcagggcaacaacacgcacatagaaaaatatgtgctgctgacggacggaacctgggcgttgacggacacggcggactatgaatacgacaaggaaaaccggtggatcaagcgcacgcggggcaacggcagggtaacggaacgggagatgatgtgctgcggccccctgtgggaaaaggatgaagacggcatcgtgaccacctactcctacaacacggcccgccagcttgtggaaaccattcgttcggctacggaaaccactcctgaaaccatcgtcagctacactcgggacgccttcggcagaatccttcaaacgcgccgggacgttggacccatgaccacgacggagagcaaggcttacgatctgctggggcagctggcacaggaaacagacgtactggggaggaccaatacatacgcctacagtgcggacggtctgacggaaaccgtcacgacgccgacaggcgcgacgctcgtcaccatccgccatgcggacggaactgtgttgaaacagagcggcacgggacagaggcatcttctttaccgcacggagtactctacagaaggcattgcccgttctacgcttattcccgtagcgaagggagagccggtggtgatggaacaaaccgtcacggacggaagggacaacgtagtgcgcatctcccgggcgaatgccaacggcggccttatccatgaccggcgcatttttgacctgaacaacaggcttttacagcagcaaatggacgggatggctccggtgctctatgactatgactcgtttggcaatattgtcaaaaccacgctcaagctggccgaagaccccactcccgccaattccctcgtcacggaatacgcctatgcctgccaacagcgggaagacggcgtctaccgggtgacaacggcgacccactacaacagccagggaacgacttacgcggaaagcacggccgagctggcttccttcctgtctgcctccctggccggaaaaaggattgacaccgatccacggggaaatgagaccctgcaatggacggaatacacggcgccggccaaacggacggagaaaacgcaaactccggcttcttccgtcattgcggaaactgttgtcatagacggttaccccgtgtcccggaaagatcatgcgggaacggtgactacttcttcccgcatctatacggccagcggcagcacggaaacctatacggatgtccgtggaaattccaccgttgtcgtctttgacctggccggccgtgaaaccgtcaggacggatgccgtcggcaacaccaccaccatccagtatgacccgtccacggcgtccccctcctgcatcacggatgcgttgggtaacacggcctgctatgcctatgatgtgcgcgggcgcaaaaccgccgaatacggtacggccctccagccctcggtgtttgcctatgatgacgcggacaggctggtttccctcacgacgttccggatcccgggagaaacaatcattaccgatcctcgggaacggacagacggggatgtgacggtgtggagctacgacgacgcctccggtctgatgacggctaaaacctatgctgacggccatggagacagctattcctatgacaactggaacaggctggcggccaaacaacaggcgcggacggtgggtcaagaggcgatacctttgacgaccacctacggctacgacctgcagacgggcaatctggtttccatcactcacaatgatgcaacgccctccatcggttgtgcatacaaccaccttaacttgattacgcaggtcacggacggttccggtacgcggatcttggcctacaaccagtacaatgaagcggaatcggaaaacacgacgggtttggtggcaagtgcgctccataatcggcgcgacaatttgggccgtgcctcgggttacagtctgaactatggggagagtatagtccagcaaacgacctggggatatgatggttacggacgtctttcctctgtctcgctcaacaatgtctcctcccccttcgtgtacggttacaacgccggccacgggctcctggaaacgcttgactatcccaataccctcagaagatggtacacgcgggaagagaagcgggacctgttgaccaggatcgactacctgcgtcccggcagtgccaactacccggccaaaaccgactatgcttacgacgcgctggggcgtcccacggaaaagaaggactacttcaatacgccggctcccgacctgacgcacagttacagctacaatggccgcagcgagctgattgccgacgcgatgagccggggaggaacgtattcttatgcgtatgacaacatcggaaaccgcatgacctctcaggaaggagcggcagggttatccacgatatacacggccaaccggcttaaccaatacacggacatcacccagggagaagaaacgccttttgtgccaacctacgacgccgacggcaaccagacaaagctccaaacttccactggggaatgggaagtcgtctataatgcgttgaaccaggcggttgtcttcacgcagggtagccagcgtgtggaatgccgctacgattatttgaacaggcgtgtagaaaaagccgtctatgaaggagaagctctcatgtcgaagaaacgctttatctatcacgggtacctgcaaatcgcggaactggacgctactaatggaacggaaacggtagtacccatcctgcgtaaaacctacctgtgggatccgatggaaccggtcgccacgcgtattctggcgatgaccatatttaacgaaacaggagtttatgacgaagacctctactatacccatgacctgttgaaaaacacaacggccctgtttggcatccaggcaggacgccgtgccttgtatgaatatggggcatatgggaatgttcttaagatggaaggcaatgccgcccagggcaatccgttccggttttccagcgagtacactgatgacgaacttggtctgatgtcttacaattatcggtattataatccaaatgatggcaggtgggtgagtagagatccaatgatggaagggccgcaggaaaatctatatggatatgtagacaatttaactagtgcttttattgacgtaagaggagagtttgggtttgcattaccggcattattaaatccaattggattgatagttgctgccgttgccgtaactgctgtcgctattactgaagttattgctccaggtacaacagagaaagttattaaaaaaatatcggagaatgtaattcctaaacctcctatagctttgcctcgggtagatattgaaaatattgaaaaaataagagaatgtgagaagatatataatgaatatcacgaattaagtcaaaaagggtgtcctccttgtacaggaacatgttgtgaacaacttaaagagagtgtaaattgtaagcaaaatttagttgattccagaaggaaatatttagaaaataattgcgatgattatttgccaggggctcaaaaatatccaagaaatcatgtgcaggaattaaaaaatagaattaattctgtaagagagtgtaagaaaagaatgaaaaaaatatgtggagaataatatgaattttttacctactaggcaggatatattagatggacaagatgacttggatattaagtgggcattagaagtttttgaaaataaatcaacggaagatgcctataaattgcttgtagacagaaaaatagatcctcttctatatagtgaattaatatcttatatgggaaataaagcatttgcttattactgcattccattttttgattatattgactcggacatattcaagataagattagaagaagaagatgtagatacttatatgtctttttatggattaaataatatttgtaaaagatatattggattcttaaataaagatgattatttagataaagatatattgttgaatttaataaaattatatccattttgcattgattttgtttttaatctctgcacaagggaacaagaggaaagtgatgatgataattataataaaattttatataaagaattatgtgaaaattacaatgtgctaaaaaataggatttcgttatattaaattttctaaaaaggaaattctatatattgtttaagttgtatatgcaaatgatagtgatggaaatttcaacagggcgggaagctatgttgaaagtctacattacatgatcccatctgctaaggcatatgacggctctataccgtatttcagccggagacagctcgtaagtctgatctttctggtagtatccattaaaatagaggggaacacgtctcagaaaaattcgtgctgcttcttgaaagagtatgccgatgacgagcgtaggctggattactatatgtcccaggccataatcttataataacttcagaaaaaattcttgaaatatttaaaaactcgtcgtcgctaaatgtatatagtaatcgggagaaagaagaattggcatttcatcttgatgacattatcaatgagatggattccttgataaaaatatttaaaaacgaaacactggacgacaaggaatttgagaatgtttatcagatgatcgttattcattggctctatcacatgaaggaattaagaaaaatattaaaaaactgggaaaagctatagaataagaattttttattttcgcaccaaagagctgaaataaaggtttattttatgtttttttaaagaaaataataaacgttaatattctaattttacaatgtaacgattatataataaaaatattaacttgccaattataaataaatgccagatgtaactactattatttttcgtatagaaggttgtcaaaagcagcctgataatcaattagagcaagtagctaatccagatcttggaatttggattaaagactatgatattttacctaatcagcaagatagagtgattggatgtttaaaagaaataataattttagcatcaagaattgattgtggagataaatatattcatatcagccttacggaaggtatggcgtcgtttaggttacccccttctcttttaaaatctatttcagatgttggttgtattcttgaaattgaagtttgattaagtatacaccaatcaccttatctttctccattctatccgggcatgcttcgagtggaaagtggccgttcacacagcttgcaatggaattgccgtgtataagacgcggcggttcatgcttttgtttttccatcaatggcggatgaatgatatgggatacgccaatcgtatcaagatgcaggtcaatatatctggccacggggggcttgctctgttatggaagtcgcgttctattttaagttgaggtttagaagcgtaagggataggatcgtgaaagtgttaaaaaagcgttgaaacgaattccccaataataaaataatccagctatgaactctctctacattattgggtttccgtccctttacggaggggcgggggccgaactttatcatcagatcaaggtttggggacatctgggggtggaaatgcaccttatccccacccagaagaacgcacaccgtgccgaactctatctggaaatggttgagtggggcgttataatacatgagagttatgactggtcggccattccggaaggggcgcccgtcatcagtttttgcaatgaggagtttctggcggccctcccggagatacgaaaacggacggcaaggacagtcttcgtcaattgcatgacctggcttttcggcaaggaaaaggaagccatgaagaggggagatatttccctgtttctttaccagaatgaccgggtgaggaagaacatgatgccgcgcctgagagccttgaattctgatccgtccatccgcttcatgacgttcaagccgtattttgacacgactgattttcccttccttgcccaacgatccacagactggtttggcgcggggcacatttcccggcaggatgaggataaattcagcaaggacacgtggcacatttacgagcattttgcttcacccgtccggaagagaggaacttttcttggctttgatcagcggagcgaggcgaagaccggaaggccgcctgactgggtggagacttttcatgaccagaagtccctgtcccaacaggagttttatcaacggtgccacatcgtgctgcaacccacggatacgacggagaattggccgcgcgtgggctttgaggccatggcgagcggaagcgtgcttattgtggataagcgcggaggctgggaacagatggtggaacacgggaagaccggatggctgtgcgaaagccccggggatttcatcacatacgccaccaagatggcgtgggaaccgcattaccgggaggatatggttgctgccgcccgggaacgcggcatggctctgggagggctggaagcgtccagggaaagctggctggaagtgtttgaagcaatcagccggataccggattagcaactttctccccgccatgataggtggatgatctgttggcgcacatggtcagataagccacgtgccgtattggcaaaggcctttctgcctgttcatgctgtaggcgatgatgtatttgaggaggtccgcctgggagtagccgtgttttgcggccgccaggcagatggagccgcttttgcccaggtggcagcagatgttcatttccaggatgcgccgttcgcctttttcaaagtcaatccggtagtcgatgcggaaatagtccatcggccccagggcgtcccagactttctgcacgtcgttggcgatgtcctgttccaggccgtgcacggagactatctggtagcccaggtggtcatgcagtttcaggtcttccgtgatgatgctgcccggtttgtcggatttcggctgcacgtatcccaggatgacgggtttttcaccccccagcacgggaaccgtgacgtcaatgccttcgcagtattgttccacgagcacttcatgcccttcctccatcaggcgccgggcgcacgcggctaccgcctcccaggagtcgcagatgctgtcttcccgaataccgccggaagcggctccaaaccgttttttgacgaagtaggggccgggaaagggcgccttgtccggaatgcctttttccccggaaagcccgatgccctccggcatgttcaggcccagggagcggaataccagcttggtcaggagcttgtcttccgcaatggcgcggatgttgggcggggctcccaaataggggacctggatgaattcgcagtacgaggagatgaatatttcaggcttggacatgccgaacctgttcatcagggagaatacatagtccacgtttcctttggcgaattgcacggaatagggcttggaggaggagacgacgtcatagccgatgtcctgaatggccttgtaaatgttgtagtggtactggggatagcctccgttgcccgtgtagggttttttggagaaatcgggagcgtcgggggcatacggggccagatacatgatccttgccggcttgccatattgattgagttgaatatccggtatttcaaacatggtctgtggcgattgcgtggaatgtttcttggattatggaaatcgccgcagtgttcaaataatataaataataagggacggcatagccgtcccggagagaatggaaaagaaggagggagagctcccactctattttctggacatccccttggccacgcgcttgacatattgctccatggacggaagttcctgttcaatgcattccaccagcttgagctgcgtgcggcagcggatgaggttgtggtccgggcgggaaaccttgaagtattggtctccttccaggtagtccgtcaggaaccggatgccgatttccagcgtgatgagttttccggagaaagcaagctggtctatttccgcctgggtcaggaagccgtgggcggcggccagatacccttccacaatggattggaacatcggcatgcgcatgcgcaccttgtccaggtcttcctcatcttcttccgtaggcggggtaacggtgcgcaccatgtcgccgaagtcgtacagcacaaggccgggcatgaccgtatccaggtcaatgacgcagacggcgtggtccgtatcctcgtccagcatgacgttgttgattttggtgtcgttatgggtgatgcgggtgggaagcacgccgctggcctggaggtccagcaaacggtccacgtcctgctcgcgcgccttgatgaagtccagttccggaaggcaggtggaaaggcgttcctgcggatcctgcgccgccacttccaccaggcggttgaagcggttccgggtgtggtggaatccgggaatggtttccacgatgtcgtccggattcatgtcgctgatcaagtcctggaaggagccgaatgcaaatccggcctggtacgcctggcgggtgttttccaccacgtcgtaggtatgcgtgcctgccaggtaattgtagcagcgccagatgccgtcgccgggaatgtcaatgtagttgcggccgccgcgtgccggatagaggttgagggtctgcccggcggagtccttcaggcggcgcaggactttccagttgatgtgccgcgtgactttctccacattgcgcatgacggctctggggtccttgaagacatagtcgttgatgcgctggaggatgtaggagtcttccgtcccgtcgcttttgcggtaggtggccttgtaagtggtgttgatgtggccgctggggatttccttgccggtgacgaattccccttcaatggcgaagaggtctccaattccggcgatacggcacaagagctggtcggggtctgtcgttgcggcaagcggagcggtcatgtggaagggagagagggttggacggatggttttaacggacgaatttataacctacaagttcgtcaagcttgctcttgagccgggaaatgccttctccgttgagcgcggaaagggggatgacgtccaccttaggaaaacgcatgcggaagttggccaggttttcttccgccccttccaggtccattttgttggcgacgacgaaccagggctgtttggccaggtcttcactgtacagcttgatttccgtgcggaggttttgaaggtcttcaatggggtcgcggccttcgctgccggccatgtccagaacgaagacgagcaccttgcagcgcgtgatgtggcgcaggaattcatgccccaggccgcggttgttgtgcgcgccttcaatgatgccgggaatgtccgccacaacgcagcggcggaagctgtcgaattccactacgccgatgatgggctggagcgtggtgaagggatagttggcgactttgggcttggcttccgagatgtctcccagcaaggtgctcttgcccgcgttgggatagcccaccagtccggcgtccgcaatgcggcgcagttccatgaagaagacgccttcctccccttccgttcccatctcggcttccgtaggcgcctggttggtcgcagagcggaaatgccagttgcccttgccgccgatgccgccctggcacagcgtgaaccgggtgccgatttccgtcaggtccgcaattttttccagctcgatgccttcgccttcccgttccagccaggtcgcctccgccatggaggaggcattgctgcggtagatgatggtgccggggggaactttcccgatgacggatttgccgtttttgccatgctttttggcgctttgtccgcctactccatccgtggcgatcaatttggggtcgtagaaaaaggagcgcaggtcattcgtgtgcgggtccacttccagaatgacgcttccgccatcgccgccgtctcctccgtccggaccgcccttgggcacgaatttggccctgcggaagctgaccagcccgtttcctccctttcctgccctggcaaatatgcggatgttgtcaacaaacatgttctgaatatgaagcatttccccccaaaacgcaagacaagtgcaggactgtacggcttttccatggcatgtgccgctaacttttccagtgaaccggaaagctgtttggcaaaaggaaattccggaaaattacggcaaccccgggtatttttccgacggtccgtattggttcgttccccgctggctgtcttcacagcagtaaatgagaagaataatgctccctatcagcggaaccagataaagcagcagcataattccgcctttgttggtgtcatgcaggcgcctgcatgtgacggccagcgaaggaatcacggtaaatagactccatagcagaaggggaacggcacctgccatgccataggtaaaagtttcagttgatgacatttgctgcggatgatggcaggcaaacaggatgatcatgaagatggtgaaggccatgtccaacaggagcaggacagcagtctgccccaatacccagtaccaatattccgaacgggtagccctcccggaaaatacagcgtatttggaaattaccgatttggcggccgtcagcagattgtatcccttgaaagctgatgcttgcgtggcgttcatgcctgatgttagccgccgcgggtccgggatgtcaattccctatccggaggaacgttttatataggagatttaaagtgtgtgaattatctattaagaatatcttttgggaaactcctgctggtcagaagtctggaaaaatggagccgcatgatggaacttcatggaatccgccttctgaaggagaggcgcatgcaaccgcttttttcccgggcatgccgggcaaacggtcttttggattgaaaatcagcgtcggcatggcatgatgcccgtgaatcatgccccgcctttccatccaattgcccgacggttccgagaaaaccatcgttcttccgaagaacggcgaatatttcgcccgcatcggacgcgacgaacattgtgaaatagtgctgccttttcagtccgtgtccggagaacacgccctgcttcagttcaaggagggcgcgtatgttctggaagacctgggttcaactaacggaatcaagatcaacgggctcacgcccatgggcgccgcctctctttacgatggcgacgaaattgccctgggagatgccaggctccggtttgccgaagagccttctccgggactcattcccgagccgaccgaagcgggggaggaagaggcagctccttccgccgccatgcggaatttgcagcaattggcggacgaggccacccgtacggcgcggaagaattatttgtggatggccctgtatgccgtcctgatgttttttctggccgtttttgccgggttgacttacaagcattacaaggtgacgggagaattgctgccccttcagtggctcggcattgagtctcccaaagcagccttgaagtccatgacgcctccgcaggcggcggacgccgcgcagcagtaggccaattcaagcttttccgccgttttcacgagctggcaggggtattccatcgggcgcgttccgcatccgggaacagcatgaagggagccacggcaccctgttccagttccagcagatattgcttgatagtcaggccgcccgcataaccggtcagttttccattggctccaatgacccggtggcagggaatgatgatgctgatggggttctggttgttggcatgccccacggcccggcaggctgatggctgtccaatttgccgggcgatatcgccgtagcttctggtttccccatggggaatggtttgaagggccttccagaccgtttgctcaaattccgttccctgcggagaaaggggcacgtcaaacatgcggcgggcaccttgaaagtattcgtccagttggctggctgtttggcgcagcaggggcgtttcctcccattccacatgctccggttgcaccatgcggctaaagaaaacgtgcgtgacggccgttccgttttccacgatgacgatggcccccacgggggtttgatgaagaagggcccggccacggggtgaaggagtggtcttcataccgtaatcatagcatgcggcggaagagagtttctatccattttacagggtatttccgccatcctgcaagggaagggagggaaaaggcgcccgtccggacgtattttgtttgaaaggctgcggttccaagtacagtattggtccgtatgaagaagagcctgtttgccgtgttgttgaccgcatgcctgtgcatgtctgtaaagggagaagacgtcaagcctccgaagacccttcccggcggatgggtttatgtttggggtgacgagttcaacgggtccaagatagacgccaagaagtggaagccggagctgggcgtgatacgcaatcaggggtcccagcagacctatacagcacggcccaagaacatgaggctggaagacggctgcctggtcctggagacccattttgagaaattcgccaatatcaattacaagaagagtccgtcggactggattaagaataccaaattcatgccctacacgtccggttccgtgacgacgatcaagacgaagaatttcatgttcggcagactggaagttcgggccaaggttcccagaaccaagggcatctggcctgccatctggctgcttggcaagaacaagtggggctggcccgtcaatggggagattgatatgctggagaatatttcccagcagccggatgtggtttattccaccttccatttgagcccggacggcgtgtccaagaaggatgcttcccgcggaggcacggtgaagattgataacctctccgatgattttcatacgtatgtcatggagtgggacaaggattccatcaagctgatggtggatgacaagctggtgaaatccattgatctgaataccaccaattatgccaatgaggcgggcaatccgttccgtacgccgttttacctcattctcaattctgccgtgggcggcaactggtgtgaaaaggctccgaaggatggccagggttatcccgtgaagttcctgattgattacgtccgtttctaccagacgaaggagcacgcccagcaggccaagcagtttgatccggaaaccggattgccgaagaagaagtaatcccgcctttttcctggctggaacggttccggtatgggggcagaagcggaacgtgtccggttttgtccttgtgcgtgggagataaggcggagacggctttttaaagaatcctttcgcttcgctctggagtggagtatgccctaaaggccgggaggccttcattcccgggtgagcgcattccgtttatgccggggtgatgtgtgcttttaccgtctttcctgatggtccgcactgtaaaaacaggcgtttgatccattcatgttccggcttcactcctcctgtggatttcaagctgaacatttcatggaatggcgttgcgccgctttcggattttgatgcagtggcgcaaaaaaacggccccgccggagaggaggggccgtttttgctgtcaaaaaggaaatgccaggctttagaaggctgttcccgtggtctgggtcagttcctggaagcgggccaggatgcgggcggtcaccggaccgattttgccggaacccagctggtaggcgtccagtttggtgacggggacgcattccgctgccgtgccggtcaggaagcattcatccgcgcaggtgatggtaaagcggttcatggttttttcctccgccgggatttgcagttcccggcagatttccagcaccacgcggcgcgtgatgccgtccaggcagccgtccgtaacgggcggcgtgaagacggctccgtcttttacgatgaagatgttgtctcccgtgcattcggccacgttgcccaggtcgttcagcatcagggcttccgctacgccctggcgcacagcttccatcttggccaggatgttgttgagatagttgagggatttgacctgggggcagagggcgtccggacggttgcggcgcacggagctggtgatcagggccagcccgttttcatacacggcgggatcgtacagggagattttatccgcaatgatgaagacgctggggcgtttgcagttgaagggattgagccccaggttgccaatgccgcgggtaaccaccaggcggatgtagccgtcgctcaggccggaagccgccgccgtttcgcataccgcgttggagagttcctcccgggtatagggaatgtccagcagcagataatgggcgcagttgtacaggcggtccatgtggtcttccaggcggaagacgcgcttgttgtaaaaccggataccttcaaaaatgccgtctccatagagcgtaccatggtcaaaaacggaggtcttggcctcctcctgttccaccagctttccatctaaccaaatcttcatcgttgtctagaatttagaaattatttatgccagagcaggatagccccatttgaagagggggggaagctataaattcaccggagagaacaaaagttccgtcacctgcaacgggagaggcacgcgcgcgttaaaaatatatggaggtattcatggagcaggcttgacatttattttccagtgcttttagctctcgcgcgcaatgtcagacccttccaagttccgcaacctcgccattatcgctcacgttgaccatgggaaaacgaccctggtcgaccaacttttgcaggcggggggagcctaccgggccaaccaggccgtgcaggaacgcgccatggattccatggacctggaacgtgaaaagggaatcacaatcaaggccaagaatacttccatcctctggaacggctacacgatcaacattgtggatacccccggccacgcggacttcggcggggaagtggagcgcgtgatgaagatggtggacggcgtgctgctggtggtggacgcttttgaaggtccgcaggcccagacgcgtttcgtgctccgcaaggcccttcaggaagggctgatgcccattgtggtcattaacaagatcgaccgcccccatgccgaccctgccgccgtgcatgaccaggtgctggagcttttcctggagctgggcgccacggacgaacaatttgaagctccctttgtgtacgggtccgcccgcgacggctatttcatgaattccatggagggggaacctcctgtggactgcacgcctcttctgttcaagattgtggagcacatccccgctcctaaggacgccgatccggaaggggagttcaagatgctcgtttccaatattgactgggacgactacgtgggccgcgtggccattggccgcatcacctccggcaccgtgaagaagggggataccgtatggcttcaccagagcgacggcacctgcatttccggcaaggtgacccgcatgtttgaatattccggcctgggcaccacggattcggccatcggcgtggcgggcaacatcgtaggcgtggcggggtttgaaaacgtgaacatcggtgagaccctgggcggttccgcggatacggagcccctcccgtttgtggcgattgacccgcccaccatttccatggagttttccatcaacaacgggcctttcggcggacgcgacggcaagaatgtaacttcccgcgtgattcgcgatcgcctgatgagagagatgcggacgaatatttccatccaggtggaggatacggacaaggccggcgttttctccgtttccgcccgcggggccatgcagattgccgtgctggtggaaaccatgcgccgcgagaattacgaactgtgcgtttcccgtcccaccgtgatcatgaagagggatgaaggtgaccgtcttacggagccgtatgaaacgatttacgtggaagttccggatgagcacgccaatggcgtcatgaagcttctgcacgcacgcaagggacagatggaagacatgatttccaaggagggcacgggccacaccttcatccaggcctatattcccacccgcggcatcatcggatttgagtttgagctggtcaacctgacgtccggccacggcattttctcccacctgttccgggattacggcccctacgccggggatatcaccacgcgtaccaccggcaccctggtttccatggaaacgggcgtttccacgccgttcgcgctggtggcgctggaagaacgcggccgtctgttcgtagggccgcaggaagatatttacgaaggccagatcgttggtgaaaacccgcgccagatggatatgccggtcaatccgtgcaaggaaaagcacctgaacaacatccggtccgccacgaagggggacggcatccagctttcccctcccgtcgccttttccctggaacgcgccattgagtacattgaacctgatgaactggtggaagccaccccccatttcatccgcctgcgcaagcgcatcctgaacgccaatgaccgcgtgagggagtcccgcaaggcaggtaattgatatactatacgctgagaagaccgctgacggcggtcttcttcgttgcccctatgccttaagaaatttttcctgactgtggtacgggaaggaaaacggcaagtgtgagattgctatcactcgaatccgggaaattattcaaaaatctacgatgtttttttgaaaattctttttatttttctcataaaacgcaatattttcttcgaccgtttcaggaatttttttactgtggccgcggccccagaaatacagtaccttcaattcatcaggaatcgtttcaggatacatatacgtggggatggttccttcaaagccgatgaggcgatattcttctagaaaagcttttctttcttccagggtagacgctcggggagaaaatcctccgttgcaaaggctcatttcccggggacgctcgcaccacacgaggaaaggcttgatgctttcaaaggcctgttttcccatttccgtgttgcacatgcacatggagatgcccttgtcgtcgtcttcaaatcctccttcagaggaatcatagccccagaaatcgctcagagtaatatcagcataacgttgatgcttgctgtatttacatgtatagcagctttctctcagaaaataatcccgcagaaacccgcgcatgaatacatcctcttcccatgttcccaagtaaggatgcctgcggtttttgaattcagcctttgtgttgaagtggtgccaactccattttttatcgcgaaaattataattagtgatgggagctttgtaggtgcgctccaagtgcccgatataatccgcaaagacggaaggggagggaacaccgtgacagacgatgtctacagtcagcaggttttcgtattcctttttcaggaaaagatgcagtcctgccgtttggcagggcgttcctgcaaacagtatttttttacctttttttaaaagttgccggatatccttgaaacaggttccggttttactttgcgtatatttggacgtgcgcagcttgggcaattctttttccgagcagatgattacatggtgcactcctttgaaatcttcatcataggaggcggcgcagacgtatcctccctgttccagcatccatgaagccagtgcggagaaagctcctccggaggatgaagccatacgtatggcttcattcctgtgataagccgcaaagaacagctcattgggaagcttgttgctgcggattggcatttgtagagccgggcagaccttacagcaaaggtcacagtcaatgcagagactttggtctattagaggatgttgaaacccttcccggtcaggaaccatggtaatagccctttttggacagatggagaagcatgcagagcatcctgtacaatcggtttccggacaaatgtgaatcatgcgttgtgaagatgcagtttttcaagaaggtggtcgtagtattccgtggagaaataagctggaagagggtgctggggcggctgatttatgatttcttgcacgtattgagggacttcgttcagtgtttccgcaaaataaacgtattcactgaaggattcgggaaaccatttaacgccggaagaaagtttatgatcgctggagttgaggacgatgacaggggtattgcttattaacgagaaaattgccccatggtaacgatccgtgacgactgcttgaaattgggaaaaatattcaaacgtggaataaagtatttgctgcctgttggagattacttcctcggcaggcgtatcgatagttgtatccgtctgttccgttggaatattctcttccaattcctgacgtaggcgttcaatggcttccggcggatagaaggcttccttgtcatttctcatgcagaagaggacgccttttcttgaatgttccggcaacgtcacgttgccgataagggaggttacgatatccggatagagaaaaaggcggcattgattgaatagcattttggctttttcataagaatactcatccctgcaaaaaagggtgcagtcagggtgactgttaagaataactgcagtagtctgggcatgggattcttcctgatagttcactgtttgaggcagaatggtcaatggatggtccggaaagagttgggcgacgcggaggtagtggctctgttcatcatacaggtccgtcatgtgatagccgctatggcacagcaggatgtcttttttcctgatgctcctgcgtatcttccgtaaaagtcttggagaagtatttgcataagtggcaatgaatatttcatatttggggagatacttccggatccatgctacgatgcattcagtttgtgcctgatctcccagatttgaatgacatggggagccaaagagaaaaacgaatggaggtctgaaaaggcgacgaaatcctttagtccattcatggaagagcatttttcgtttcatgctttcccgttttttttcagagatccaggggaagatggaataaagcttctgcagaatagggagaaggaacatgtctggttgcttgctgaatactgttacgttaatagtttaacttctgcattttttaataggaaggacaaaagaaaaaacctggcctcttttcaaagaggccaggttttgggaaaatggcgggtcaaagctcttttcagatcttgccgaagagggtcttgccggcggacatgaggttgtcggcggcttcctggagacgggcggcgactcccttttcacccttggcgaggtaggaacggggatcgtagtccttcttgttgcccacttcaccgtcaatcttgagcactccgttgatgtgttcgcacatgtgggagacgatcggacgggtgaaggcgtattgcgtatcggtgtcgatgttcatcttgactacgccgtaggaaacggcttcgcggatgtcggaaagttcggaaccggaaccgccgtggaagacgaggggcatgcgggccgcttcgccgtgcttggcgactacggcttcctggccgtcgcgcaggatgctgggcttcagcttgacgtggccgggcttgtacacgccgtgcacgttgccgaaggtggcggccagcatgaatttgccgaggggggccagggcttcatacgtcatcagcatgtcttccggagaggtgtagagcttgtcagcggggtggccggagttgtccacgccgtcttcttcgccgcccacgacgccgatttcaatttcaaggacgatgcccagttcggcgcattccttcagcagttcacgggaaagcttgaggttttcagccatgggcagcgtggaggcgtccagcatgtgggagttgaagaggggggcttcaccgcgttctacgcggcggcgggattcggcgatcaggggacgcaggaaggtgtccacgtgttcgggctggcagtggtccgtgtgcagggctacaagcacgttgtgcttttcagccaggcggcgcgtggcttccgccagaacaatggcgccaagggcggaactgccgatggaggtgccggaggcgaatttgccgccgccgatggaaacctggatgatgccgtcgctcttggcttcggagaaggcgcggagggcgccgttgatcacttcgatcgtggtcacgttgacggccggataggcatagccttccttcttggccgtttcaagcatggtaatgtattgttctggtgtggctattggcataacggggacatgataggtgttttttttcgggagggcaaggctgaactcaggcgcgcgcaggggttgcagagctcttgcgggacatggtcattcgcggatcattttcgcctccggctgcgccggttctccggagtccgtccggtagttgacgcgctgcgcatccaggaagggcttgtgcctgtccaggcgttccttgaagtctgtgaagtccttgcggccgggctgcgtccagcccagctccgcgatggcgaacatgcgcggaaataccatgtactgccatttggccagtgtggtcatgtattcgctccagcagcttccctgcacgcccaggatgtttttttcctgttccggggtgagccccttcggaacgggattcatgttatagactttttgcagcggaatggtggagaaagtcgccatttcatattcggggccttccggatgcggaccctcctgccggatcaggtacgtgctttcaaagggagtcatgatcaccttgtttccgtgcttgatggcttcccgggcaatgccgggatcatgccagaccatcagggtggccgtcttggaaaggccgccttcccggatttcatcccagccgatgatctgtttgccgcgcgcgttgacgagtttttccacgcggtggacgaagtagctttggagttcctgttcgtttttcaagccgtttttcttcatcacctcctgggcctggggggagtttttccactgctgcttgggggcttcgtccccgcctatgtggatgtagggggaatccggaaagagctggcagacttcttccaggatgccgtcaatgaatttgaaggtgggttccgtgggactgaacgtgaaggggagaatgccccagcgcgtcgccacccggggcttgtagccgggaatgtccttgttgccgaattcgggataggccgtgatggcggccgcggcgtgtcccggcgtttctatttcaggcacgatggtgatgtgcctgcgtttggcgtagtccaccagctcctttacttccttctgggtgtagaagaaggtgaagggttttccgtctcccttgttgcggttgccgggaatggggctttccgggcgggtggcgccgatggaggtgagcctgggatattttttgatttccagccgccagccctggtcttccgtcaggtgccagtggatggtgtttaccttgtagcaggcgagcaggtcgatgatggttttcagctccgcgatggaacggggattgcggccgctgtcaatcatgatgccgcgccacgtgaagcgcggactgtccgtgatggtcatgcagggaagggcccagtggccggcggcatccttttccagagactgcttgagggtctgcgccgcatagaaagctccggcgggggacgtgcatgagacggcgatgccctgcgtagagaccttgatggaataccattccggagacagggaggcgtcttttttcaggaggatctgcacggcattggccgcggagggagccgggcttaccttgatttgccggaggttgttggagaatcccgtcacgaaagaggcaatgcagcttttatctcccgttttggaaacaggcagcgtgttgctgaccagaaatcccggcttgtttttttccacatccagcgcggatggaagggggatgatggccgggtcacccggtacgggcctggaggggagggaataggcggcggacgcgaacaggaggcctgcggctagaaggaggcttttggaaaacatgacgggaaagggaggaaaaagtttcacagtaaatagtatattccagaagcgtccgcaaggcaactttacgggatttgccctgaagggaataaagaagccctgcctcccgtgccgggggtggaccggaaagccgcagggctgatgccggggcacggattttttcgaaaatccgggaatgcacatcaggatgtgttatttcaggatgatggaagtggtgccgggtttgatggcgtattttttgccgttaatcactagggaataagggttgttgcttgttacgccaacggtgtttttgccgtcaaaaacgatgtcggtcgtagtcgtcccgaaatgaagattttttaatccgtgcctgcctttctcccttttcaatctccactggacttcattccgtagtgcagaaatcttatggaagcccagaacgttttcaatgaagagggaaatggggcccagcgccgaccagccgcaaaattccggccgggccctgcgtccatgttcggtagacggctcgttggaactggggctgtagcattcccatatcgtgtgcggtttgatgccatggtaagcggcaagctgctggcggatgattttttcagcgatcgtgtcggcttcttcatggtagccgtattcttcaagcgccttgacagtcatgtacgtggtgggcagccagatgccgccgcgccagtaatccccggtttggccatggtagtccttatccctgcgggaaagggtgggcgtcgggtagtttcctccgaattcctgcgggtccagaaggtattttaccatcttttccgcctgggccggcgaagcgactccggctaaaagcggccaataggaggccattgtcctgatgcggcagggctgcctgttttctatcgccacatcatagtagaacccgtcctgctcatcccagtacagttcgtttattttgtctttcagcttgcggtagatggcctcccatttcccggctgcgtctgcattgcccagtgattgttccaattgggccatgcagcgtgcgctcagggcttgctgggaaatggcgtcaatccataaaatcttattgtagccgcctgcgtcccggcctctgggcgtgttgtccattccgctggcgccccccgtccatgtaaagccatcttcaccgatggcgttcaggtagatgttttggggagagcattcgaaacgttcccccgctttggcattggcaaaccagtcaaaatgtttttgaaggtactgtttccgattcaggatttcatggatgcggtttttgtttccggtaaagtcgtaatattccttttcaacccatgcgaataacggagggttgtccacgaggtgaatgcggagcggagttttttccttatcccaaatgggcttgtacaggttgtccatgcttccctctccggggaatgaatgcggcgcatacttggcgaagagcaccatgaaacaggtatcccaaatccagatttggtcttcgtaacagttttcatccatgtagggcgacccgggaaggccctcagggccttttcttacccgtccggccgcgatttcccatgttttatggtaaaggtccacgaggtctttgtcagggtaaaccggctggggaatttcctctttccagccttcctggatgcagctgtcatgatgggccgtagctccaaagccttgcacgcaggctattgcccccaggatgatgccgcatgctgtccgcaggtagtatttcattttcagtatacggccagggaggcggaaaaatatcgttttttctcgtctcgcggcgggttgaaggcttttccgtgccgtcatgttcccctagcgggtcaatggtgggcgtggaaccgaattagtattactgaaggcggcgctgccgccggaaggatgaaagtgaagcgacagcgtggaggaaagggaaaatgattttttccgtcaacatggaataataggaaaagggacgccccccctccggtttttaccttcgtgagacgccctgttgaaagtggagaaagatgaaatgagggaggttattccggaatggattccccccggatgaggtcttcccaggtctggcggctgcggatgacgttccactggtttccgtccaccagcacttcttccgccatggggcgggaattgtagttggaggacatggaaaaaccgtaggcgccggcggacagcacggccaggagttctccctggcgcacgtccgtcatgtccctgttctgggccaggaagtccccggattcgcagatggggcccacgacgtccgtagtgatgcaggattcggagaggtgttccctgaccgggatgatttcatgatacccctggtagagggcggggcggatgaggtcgttcatgcccgcatccacgattttaaaggttttggcctttcctgttttttcatacaggcagcgggtgatgagcgcgcccgcatttcccacgatgaggcgtcccggttccacgatgatatgcaggcccagaggctggagggtgggaacgacggcctgggcgtaagtgctcagcgtgagctgggcgcagtcttcattccaccattccttgacgccggaatccagcgtatcctggtaaacgatgccgatgccgccgccgatggagaagaattcgatgccgtgcttttctttcagcgcggcggccagcggagccactttcctgacggcttccaggaagggtttcgcctgggtgagctgggagccgatgtgcatctgcaggcccttgagttggaggttcggaagttcgcgggccgccatctcgtaaagaggctcaatgagttcaaagtccacgccgaatttgttttcagccttcccggtggtgatgtatttgtgcgtccccgcctccacattgggattgacgcgcacggctaccggagccttcactcccatggacgcggcgatggcgtcaatggcgcgcagttccgcctccgattccacattgaagcagtaaatgccctgttccagggcgtagcggatttccgcctctgtttttcccacgccggcataggtgcatttggaagggtctccgccggccttgaggacgcgaaagagttctccgccggaaacgatgtcgaaccccgcgccattgcgggccatgaggttcaggatggcgatgttggagctggccttgacggcgtaggccacttccgcgttaaggggcgccagggcttccctgaggcggtggaaatggttcagaatggtctgcttgctgtagacgtacaggggggtgccttccttgtccgccagttcctggaggttgacgttttcacagtagagcgtgccgtttttatatgcgaatgaatgcatggattattccttggttgtgctttcgttggttttcccggaatggagaggagggagcgggaatctgggcgtaggggggttgtcgatgagctgggcgatccaggcgagatccttggagctttccagcccgagcttgatcagcatggtgatggggacggccagcagcatgccgatggggccccatacccagccccagaagatgacggagagcaggaccatgcttgtcacgatgccgaattggcggcccagcagcatgggttccaggcagctccccaggaccgtgttgatcaccaggtagccgccggctacgatgatgcccgcggtggggctgatcaggagcatggcgagcagggtggggggaatggccgcgatgatggagccgaaggtggggatgaagttgagcgcgaaggccacgatgccccacagcagcgggaagtccaccttcatgtaatagcagagcaggaaggccagcagtccggtggctgcgctaatgaaggtcttgataatcagatatttctggactccggccagagctttggaaaatttgcggatgcccgtgtcgctgttgttgcccagtttgttgatgttcatccggaagcggggggcttctcccaggaagaaggtcatcaggatcagaatcagggtggtgaaggtcagcatggaggcgagttgccccatcacccccgtggagaacgccacgatgcgctgcccgttgagcaggtccgggagttcctgaagcatctggtccgccagattgttccagtcacgttcaatgaggaaggcgcggagttcgtggattttctccatcatcaggggctggtatttgaccgtgaccgtccgggccaggtcctgccccaggtactgggccagataggccaggcccacaagaatgccgaagtccatgatcaccgtgaaggttaccgccagccagtgcggaaaacgaagacgtcccttgaaaaaagtggtcagcgggtaactgacgatcgccagaaagccggacaggacgatggggagcagcaccggcttccccgcctgcagcccggccgtgatgacgatgacgctggcgagcatgagcaggattttcaggccctcttttccggattctttctgaggagtcatggaaggattggtgttaacggggtgagtaatggtgtccgatttcctgcgggattgcaatattaaaggccctcattcccatcatgttcccggaaaaagcggtccaggtcttcaaagcgggtcaggaggtagtcaggcttccgttcttcgagcccctttacatccgcctccgcggcccatcctgcggcaagaatgcggatgggaacggcgcggcatgcgtccacgtccgtgggggaatccccgatgtagatggcttccccggcggaagagtccaggcggtccagcgcccgcctgatgcggtccggcttcacgccgccctcaggggagcccgtttccagaatggggaagaactcggccagatggaaaaattgaagggaaatctccgcgctttccaggcgtttgccggtgaccatggccagacggatgccgcggttgcgcagggcgtgcagcagtccggccgccccggggaagggagtgggcgccagttgtggatgcagctcacggtaatagcggaggaacagttccctgcctttttcgtgcagttccggctttccgggaagcagtctttggatgacgcctaggtcatccggcccgaactggcgttcgatttcctcatccgtcaacgttctgccgtccagttcccggacggcgcggcggaaggcttcccggcacaggggtatggtatccgcaagcgttccgtcaaaatcaaaaatggcggttttgatcatcagccgtaccctacatgccgcctgcggacggttcaaggggaaagccgtgcctgaatagtcatgatgacgctgcggggcgttccggaccggcaggacgtgtcatctcgtatggaaaggtcaacgttccgtccctgtaagctctctaattcccttatgcacgggaaggctccaaaagaatatttatccctgtggagcgtgattgcattgggaataggttccatggtaggagcgggaattttcgccctcatgggtcaggcgaccctgatggcgggcaaaaacgtgtactggtccttcctgctgggaggcgtcgcggccctgctttccggttatacctacgccaagctgggttcccgttatcccggttccggaggaatcatggattatttcaacgaggctttttcccataagaccctctccggcgcgctgacgctgatttacctgggaacgctggtcattaccgtggccctggtcgccaagtccttcggggcatatgcgtcccgcctgtttttgccggacgaattaaccaacatctattccaccgcccttttcgccagcgtggccattctgctgctgggagcattgaacatgggaggagccaaggccgtagggaagtcggaggtggtgatggtggcgttcaagctgcttattctgacggttctgatgcttgccagcttcggttcttccgtgccagtgggcgcggaccctattccggtgaaaggactggacgggctgctggggagcgtgggactgacgtttttcgcgtttgccggctacggcatgatggccaatacggcgggcaatctgaaaaatccttccaaaacattgcccaaggccattttcctggctatcggcatcgtgctggttctgtacctggtgctttcctacgtagtgctgaccaacgttcccgccacttccctggaaagccacacggaaaccgccgtggcgcaggccgcctatcccgtgctgggtgtgtggggcttcatggccgtatccgtggcggcgctcattgccacggcgtcagccattaacgccaccatgttcagcatgctggacatttcccgggcactggcgcgcaacggtcagctgggagccatcttcaagcagcctttctggggcagcggcacggagggctttttctatcttctgctgggcattctggtgatgacgaatgcctttaacctggtagccatcgccaatctggcgggggcctgtttcctgatcagctacctggcggtgttcgttgcccattggcggctccggaaagagacgcaggggaacgtgctgctgatcatcctcgggttcctgctgatgctgtttattctgggagcctttttctaccagatgttcttcagccagccttatctgattccgctgatcctcctgtttgtggccgcctgtttcattctggaatttttcattcgcaaaaagctggcgaagggggcttccaaggcttcctaggctgtggggggttaggaaagaaacgctttacctcccgttgcacttttaatgcaggaaggaagtgagggggctggtggcggcagcccgggcggaaacggcgggaaggccggccagatgggccatgcgcccggcgcggcaggccagcgcgaacgcttccgccatggaggcggggtctccggcggcggcgatggccgtattgacgagcacggcgtccgcccccatctccagggcttccgccgcatggctgggggctcccagcccggcgtccaccactacgggcacgacggcctgttcaatgatgatgttgatcagctccctggtcagcacgcccttgttggtgcctatgggagcgcccagaggcatgacggctgccgctccggcttcctggaggcgtttggccagcacggggtccgcattgatgtagggaagcaccgtgaagccttccctgaccaggatttccgccgctttcagcgtttcaatggggtccggcatcaaatactgggcgtccggatggatttccagcttgatccagttggggagtccggctgccgtcgccagtcgcgccagtcgcacggcttcttccgccgttgtcgctccgctggtgttcgggagaataaggtatttttcagggtcgatgaaatccagaatattggcggcggggtcatgggagcccgtcaggtccgcccggcgcagagccaccgtcacaatttgggagccggaagcttccagagcttctttcatgctcttattggaagaaaactttcccgttcccaccatcaggcgggaggtgaattggcgtccggctatctgcaaaggtgaatctgtcattgcgggtgaagggtaccttccctttcctttccaggcaagggggaatgaagaaaaaggcaggagttgccgcggcatggacgagcgcctccgactgggaatgaaaggttgattcgtccatcttccagatttacccgccctgcgggcttcaagatgagctttccatccagccggacttgtccggtttcccggccttcatacaacctttccgataaaaaatattctgaaaactttccttcaagtccaggagaaaccggtttttgaatgaacggagggagggacccctccccccctctattattccccgctgaaggaaacgccccggagcgctctgggcttgcccaggatttcctgataaagaatggccgttttcaaggattgggaacggcgcagggagtttttcagggaaagaggttcggacgcggcgaccgtgggaagcggttcagaccggctttccttcatttccctttcctgcaaacgatgcagggcagcctgttccgcgtcagacagggaacgcatggactgccgggcttcttccgtggcctttacgtagcgttccagcacgttctgggcggtttgctgggcggtttccgccgtccactccggcttgggttccggttcaggacggcgcttgcgggccacggcgggagtgggaagctccacgggtggggcggaggggcgcggagcgcgcgccggagcctgtggccgtgccggctgtggctgccgcggctgcggattggtccggcgcatttccgcaatgacttccttcacgcgtttttcatgatggtcttccgtgtccaggacgggcgtttcctcatctttttcttttggtttcaaaaactcaattactttcttgatgagaaagatcgcccccacgatcagccagaaccagagcttcaggctgtcgtcatcgccgccggaggcgagcatgtatgccagtgaatccataaaggaggaagggccaccggagagaaaatccggtctctccggtggcctgagaatttatttaatggaagagggggaagcatccggcttggcaatggaatccctcatcttggtatcggccactacgttctggtagcgggcataatccagcactcccaggttgccgttgcggaaggcttccgccatggccatgggaatctgggcttccgcttccaccaccttggcgcgcatttcctgcgttttggcggccatttcctgttccgtggctacggcggcggcgcggcggacttccgccttggcctgggcaatctgcttgtccgcttccgcctgttcggcctggaggcgcgcgcccacgttgccggccacgtccacgtctgcaatgtcaatggaaagcacttcaaacgccgtggcggcgtccacgcccttgtcgctcacggtgcgggagattacctccggcttttccagaacatccttgtaggagggcgcggagcctacggcggagacgatgccttccccgacgcgggcgaccaccgtttcttccgtggcgccgcctacgaaaaggtccaggttggtgcgcaccgtcacgcgggcacgcactgccacggcaatgccgtcacgggccaccgccgtcaggcgcgtctggccggagctggggttcgggcagtcgatgacgcgggggttgatggaggttcgcacggcttccagtacggtcttggacgtgcctttcacggccaggtcaatggcgcaggcacggtcatagcttagcgggatgccggctttttccgccgcaatcagggcgaggacgcagtccacgatgtcgccgccggccaggaagtgggcttccagttcatccgtgctgatgtccagtccggccttggccgccgtgatgcgggtgtccactaccagggggtagggcactttgcggagccacattcccagcatgttgctcatggagacaggggctttcgcgaggcgcgcgcgcagccatgtcttgaagaatttggcgatgatggcgaagaagatgaccaggaagatgacgaggacgatcaccaggatggtcccccaggcggtggcgttggagatgtttgctaacagcaaattgttcatgtatccttccataccatattaaccgaagcagggtaaagatataattgtgttacctatggtttaaaggtattgacctttcggcggattcgtggcaatgcacttggccgtgcgcaccattgattttgattatccgctgccggaagagttgatagcggaccgccccctcccggaccgcgccgcctcccggatgatggtcatccaccgggataccggcctgattgagcacaggcatttttgcgacctgccggaatatgtgcgggaaggggaccatttcatcctgaatgataccagggtggttcccgcaaggtatttttccaatgacggcgccattgaagtggtgcgtgcagaggtgctcaaccccctgctgtggaagtgcatggtgcgccccgggcgcaagatgaagctggggcgtacggtctccatcggtgatgcggtgggcaccgtggaaggcattgacggggaaggctaccgcctcatccggtttgaccgggaggtggatgaggaaaagtacggccgcctggcgcttccccattacatgaaccgggagagcgacccgtccgacaaggagcgctaccagactgtttacgccaggcatgaaggggcgattgccgctcccacggccgggctgcattttacgccggagctgctggcggccgttccccatgattttctgacgctgcatgtgggcgtgggaacgttccgtcccgtgaaggcggacaggattgaagaccaccagatgcacacggaacattttttcctgcctgaagccaccgcgagggcgattaatgaggccgggagggtgattgccgtgggcaccaccagcgttcgcgtgctggagcatgtggctaccgcggaaggactgccgttaaaggagtgctccgggtcaacgaacatttttatttatccaccctacaagtacaaggtggtggatgccctgatcacgaatttccacctgccccagagcacgctgctcatgcttgtcagcgcctttgccggcaaggagctggtcatgaaagcctacctggaagccatccgggaacggtacaggtttttctcctacggggattgcatgctgattctgtagggttccggcgtcctttccttccctctggcggaagaagcgcaggctgccttcaacgcttgccgcacggaagttgttccgggctgcgaggggatgaagacggagcgccgtccggggaagcgtccgggtgctgctcttttttaagctccagcagggtttttccgtggtccctgatttgctggagggcagtcaggaagtgcagcgtttcccccagcagtatgttcatgacgttggcatagtggcagtccgtgtttttcaggcacagccggggaaaataggaggcttccagctccggcgcattccatttgtcccggataacgcggcttctgcgggatgccggaggccagcagggatgctgccggtccctcaaataaaggaggtagcagtcttttaacatgtcgagctgggagacaacaccggcacgtgcaggaggagtgatggacggctggacatcctttactccttcaagcgtcatgttgatggttgtttccgcaaggacggtccagtaaagaataggttccgccacggaacggctccgcctgcggaaccgcaggtagaaatgatggctgagttccagggccgacaaggcttttacgtaatgcaccaaaaccacccggccatattgccggaaaatgaagtgttccagcttttgccggaggggagcgtcttccattcccgtttccttcctgagaagggtccactgttcctcgaatgttgaattttcagccatgaatttgggaagaggttatttttaataaatataaattatgttaccatgaaattcaaataaaataacaatcattatcaatgtttatcaaaataatacggggaaaaagagaggaattcctgcggctggggcggtaacacggtaaccgcctggcgcaaaggcgtacgagaaacacctgcgtccggaaaaacagcctgggaggtggtaagcccgtgcacgacggcttgagatgtggatgccgcggataatgaaaacgccatgcccggacatgcaggcatggcgcttgtcaaatcaggcctgagccggatcagaaattgtaacggtagccgagggctccgccgatggaggtgtctccggagcggagatccgcattgccgtccacataaacggcgccgtagtcggagcagggaatgctgaggcctgcgcccagctggacgccggtgcggccgagcttggctcccctgatggtctggacaaggcccggattggccaggtaggccacgttggcctgtgccttgtcctccccgaagtcctgagaaaccagaacgcggaattctcccgtgatatcacgcccggtcaggttggaacccagaacgcctttcaggcgcagaccggcggccacgcttccggtggtaatatccatgtcatccacgcggagtcccgctccgcctgcgccggtttcattgaagccgtccacggaggagtgcatgacgctgacattggcgaccggctgaaggatggccgtccggcgtttgttgagagccaggtcataagtgagctcatacatggctccgaagctcatgccggtggtgctgaagctggcctggtagcttcccagctcatggcgtacgctgcgggtaatgtccgcatctgaccagcctccggagagaatgagggagtggccccatttcctgtggcggtagtggccgaagaggctcacgtagtaggtgtccaggtcgccggaggcggaatcagccccgtcagaggagtaatccccatagttggcggagaaggccgcgcccaaagtgaaattctccgagcagttgacatccagcccggcggtgcctccccaggagttaagggtgaaaccgttgccttcattggaaccgtccagggaatccctgcccccgttggcttcaatccagccgttcacctggggaaggtctccctgaatgtagtcgggattgaggcccatggtttccgcgcggttgcggatgaaggtcatttccctccgcaggccggacctttgcgcggccaggatgccgggaatggccgttccggcggaggcgctcagaaggcggttggccctcgcgtaatctccatcgttccaggcgttggaaacggcgcggttcagggagctcagctccgttccgtccttgatctccccgcagttccagagcaggacggccccggcggcggaattggaggtatcagccgtggcgagcagggcgttgtccgccttgcgggttccggtcagcacgatttggccgtcccggttttccgcatgcagctcggaataataggtgcccagcgcgccgtaagcgttgatattgaggtagctgcccaccatgttcccttcaaagagaaccagttccagcatcctttccggcgcggcgacgttggattcaatattgagggtggtcccgttgcggtctccctgaatggtcagcgtggctccgtcttccgtggaaatgaagggagtattggcctgcgccagcaggggattaatcacgagcgtgatggtggaaccgttcatgaactggcttgttccgttaaggagaagcgtggtattatgggcggctccggcggaggccatggcgagcgtaagcgtgccggtggcatcaaccgtcagggaatggagcagaatgggattggctgaatcacggatcagggccacttccccttccgtaatgttgaggttcagggtgtctgaccccgcgccggtataggtccacgccgctttccccgccttgttgattgtgccgttcccctggaaggagccggaaaaaacggaggatttttccgcatggagggcgagttccccgttgttgaagatcacggagcctttccccagcaggccgcccaccatggaattgcgtgtggagcccaggtccagcgcggcggcagcggattccggacccacggcgaccgccgctccgtcaaacctggcatttccggacagggtgaaggttccttcctggacggccagcaggccggagccggcaatagtgatgtccgtgtccagcttgttgccgttgcggatggccagcatggaatccgcgttcagccgcaggatgccggtgccggtgatggaggcgttttccgtcaggacattggccgttccgctcatctccagggtggcgtcattcagtgttagagcgccttcctgcccggagaaacgggtggtggaggacgcatggaagatggaaatgccgcctccgttcagcatcatggctccgtaggcggaggattcggaagcgaggatgatggctccgctggtggaatccagatggaaccccgcgtttccggcgcttcccagcgtcagggcgccggcgcctttcttgctgagcgtgcccgtgccctggagagttccattccacgtgaggggattggccgtatccagggtaatttggccgccctgggcggccagaacaccgtctcccgtgatggaatgaatgacaatgttccgggtggctcccgcgttcagggtggaagcggcggaatccagggccagcgtagctatttccatccgggcctggttggtgaaggccagcgttccctgggtgatgtgcagggtaccgttccgggtaccgtcaatgtagatggcgtctccaatggtgttgctgccgtcaaaggccagcgactttccttccgccagggcgacggtgccggagcctaccagtttgaggtcgctggaaatggtattgtccgttccggtcagagtaagggtggaatggagaagattgatggagccccgggtgccggtcagctttccgacttcggctgtgacttcctccctggcaagctgggacacgccgaaggttcctccgttcatcttcagctccccgagggtgttggaagcgccggaaagcaccagtcccccctgctgtacgtccagagctccgctggtggaaaagccgccgcccagcaccaggtttttagcccccgtcttgatgaaattggcgtcattgccgatgacctctccggcgcagatggagtccatggcggtgttggagagattgacgatcagcgctttccccgcagtgatggtgacgttgtattccgccttgtctcctctgagggagggcaggacgatagtagcgccttcacccggatcaatagtcatgttccggttgacgagaacggaagtgaagaaattcaggtcaatctggtccgtgatggaagcgccgtccacggacgcataataggtagggtcatccttgagcacccagcccatctccgcaaggagggctttttcctggtcgctggggtttctcctctggatgccctccccgatggaatattgcatcagggcgttcgggtcgcttgcagcgtccacgtgggacatgctggaaccgggagcgaaaacaaagggattgtaaacagtgaggcctccggaaccaatcgtgtaggaaacgccggtctggtaattgaagcccgcatctcccggatggttgccctgggcatccgtgatcagggaatcccagatcgtgtagtattctccgtatgttcctgtatcattcagcgagttgaagccgacgttatgcccgatttcatgcagaaggacgctgatgaagtctgtggcgttctggggcgtggtattgcctgtgctgaaaccgtagacgggattgaattggagcctgaaatccatttccccttcctccagcacgacgtcttccccttctttccagatgacttccgtggaagtggccgcattgtagttttccccgtcgtattcgacgtaattggagaaagaacctgccaggacgccttcttcaagggccccccaggaaatggtcgcttcaatcttccgggaagcggtgttgcggaaggtatcgtcccagatattgagggtggtggtgacggcggctatctggtcgtcactccagtcacgggtccccatccagtccgccggaccgtccccgttgccgaggagcgtgatgtggaagttcttggtagtgatttcatgggtggctgcccagcccatgggggccagggtagagaggcccgtcagacaggataggatagatagggtgagtttcatcaacacgctttataggaatcccgtatgcgtaaagtcaattagaaacgattgaaaatacaataaaaacggagtttttaataaaaataaaaatatgatagaatcctgccaggccccgtttttcctgccgcagattccccccggcaagaaaaatgcgactgcattccagtgcggcgcaatgcgttcttgtgaggggaaatcaaacgcgatagcgtaggaacgacctggtggtcaaagataccctcttagacttgtcacgcgcgtatggatcacgatttcagcctcatcttcacttttgtcggcggattgaccgccgccctccttttcggccttattgccagaaaactgcatttgtctccgctggtcgggtacctgctggccggggtagtggtagggccgtattcgccgggatttgtggcggattcccacacggtggagcagttcgcggagctgggcgttattctgctgatgttcggggtggggctccattttcatttgaaggatttgattgccgtgcagagggtcgcggtgccgggagccgtggtgcagatatccgtggctacggtgctgggggtactggtgggctggatgttcggatggtccacgatttccgggctggtgttcggcatggcgatctccgtggcgagcaccgtagtgcttacacgagtcctggaagacaaccagaacctccatacgccgagcggccatgtggccctgggatggctggtggtggaagacctgttcaccattctgctgctggtgctcatccccgccgtgatggaggcgcgccagagcggtgccggggactggagcggcattctctacgaactgggctggatgttcgtcaagctgtccctgctggtggccctgacgctgtttgccggaaaaaaaatcattccgctggtgctgcgctacgtggcgcggacgggagcgcgggacctgtttacgctggcggtgctggtcattgctctgggcgtagcggtgtgctccgcgaaattcttcggcgcttccatggtgctgggagcgttcctggcggggatggttgtggggcagtcggacttttgcgctcgcgcggcggcggaggccatgctgatgcgggatgcctttgccgtgctcttctttgtttccgtggggatgatgtttgacccgatgtccgtgggggactgctggccgctggccctggcgacgctgggggtggtaatgatcggcaagccgctggcggcctatgcggtggtgcggtgcctgcggcgtccgctgccgctggcgctgagcgtatccgtagccctggcgcaggtgggtgaattctccttcatcctagccgggatggggctcatgtacaacattctgccgccggacgccaaccaggccatcattctggcggccgtcgtctccatttccctgaatcccatcctgtaccgccagattggccctgtggtcaagtggctgcaaaagcgcggcatcggccttacggacctgggcggagtgaacagcctggcgctcccgtcgccggacgcgcggcgcgtggtgctggtggggtttggccccacggggcgcattcttaaaagaatattgaatgacaacggggtggaagtcatcatcgtggagatgaacatagacacggtcaccgccatacgtgaacagggcggagacatcgtttacggggatgccagccagcgtgaaattctgcgccatgcgggcattgaatatgcggaaagcctgattctctccgcctccattccggatgccaaggaaatcgtgggggtggctctggagctcaacccccacattgacgtgatgatccacaccaagtacatgagggacgtggacgtgcttaaggaagccggcgcctcccaggtcttctcctcggaatcggaagtggctctgtccatggcggaatactttctgcgggaaggcggcgcggacgacgaacagatcgtttccgaacgccagcgcatccgtgcggaactggacagggaagtgcccggagcttccgccgcggggcactgatgaccgggggcgctacttcttgcgggcggagataatcagcatcatggggcggcgcagctcttcctgcatgccggggacggaatccagaagttcacgggacggcttcggttcctccatggcggtaacctcaaatccgccggcggccagagcgccgagataggaagtaagcgtcctgtgatacttggtcacttcctcccccaggaaaacggcctgccgcgggccttccatgaaatagccgtccacgggccagtgcatgatctggccggattcatcgtaatgccagtcctgcgttccctgggcggtgaaaacgggatgctccacggagaaaataaaggcgccttccggcttgagccagcgggagacattccggcagactgcctggaaatccggcgtgtaatggaaggccagggagctgaggacaatgtcgaaggaagcctcgggaagcaggatatcctccatgggcatgcagcggtactcgataatgccttcgtttcccatggatctggctttggcgatcatctttgcggaaatgtccacgcccagcacggaggccgccccgtgctccgccgcataccggcagtgccagccgaatccgcatcccaggtccagaacgtgcctgtcacggaaatccggcagcagccgttccagtgttttccattctccggccccttccagcccctttacggaacggtccatttggctgtacttccggaaaaaggcgttatcgtcgtacttgttttgtttcatgatggggaggaaatgaacgttgcgtggaaataaaatgctgttttatttggccggtttcagaatgacggtaacgcggcccaggtggtgcagggcattttctatctggtcttccagttgggaggcgatctggtggcattcccggatggtcagggatgcatccgcggagcatacgcaagtcagggtggggaaattgtcctcccgtgccaggtccagcttgagaaccttgcagatattcctgtgctgctggaggataaggttcaccttcaggcggacttcctccggcggaacgtgctccggaatggcgttcgccttcatatcgcggcagtccggctcaatgcggcagatcaccttctccggcttgagcgcatgctggacggaatcccggaacgccttcaccacatggtagccgcgctccagaggccagtccgcgggaatctccacatccatgaaataacagggagcatgtttgccgctgcctgcatagaacccgtggatgcggacatggtggcgcagggccagccggtggacgaccgtgtccggctccatgttggaaaaattctcacgggccggttcgatatggacgatcacgtccgcttctggcagctcgtacttgacaatgccttcgatggactccgccacatcatgggcgtcgtccacgtgcaactccgcgggcgcttccacgtccagctccacaaaaatgcgggcgccgccgtcacgcagacggatgcgcttgaccgggtaatccggggcgttcttcttcatggcggttagaacctgctgcgtcagggcggaagaaccgccgtccatcagggcgtgaatggaacgtttggcaaggccgaaggccacggaacaaaccagggccgccacaaacagggctgcgatggcgtccgccttctccagcaagccatgccagacggaatctgcgggaaccaggtgcgccagccatacgcagaaaaggcccagcagcacgacggcggaagaccagatatccgtggtaaaatgaagggcgtccgcttccagcgcctggctcttgtgcttcttggccacccggcggagcatggcggagcggttcacgtccaccagcagggaaacggccaccacggcgaaggcccaccaggtgagggtgatctccgcctcattgtaaaacagccggtccacagcctcccatacaatccatgcgcaggtaatcaggagcagggcagtttccgcaagcgcggaaagattctccaccttctcatgcccgtaggggtggctctcgtcggcaggacgggcggccaccttcacggcgtaaaaagtcatggccgcagccatcaggtccaggccgctgtgcagggcctcggaaatgatgcccaagctgcccgtcacgataccggcccagagcttgatgcccgtcaaaaaggcggaccacaggacggaggaaaaggccgcatgtgatttttcttggtgcgctgcttgttccataagacagagaaaaggaagaggagcatatctaagcccgcctccctttcttagtcaatgataacacagacggcgttgaacttcggtcccgttccatgacggaatagaggttttcccgggaaaatgcgggacagaatatcgcggatacttttaatttttattattaaattgaatattttttgaatggatttctaatgaagcaaacatattgggcgtgttgccaaaattccgtttttcttctacggaagagataaatacggaggtattcccccaatacgagaggaacgccatcctatttcctgcaaagggatacgtttcttcgacattcgtaaattcccattactgcgggctaacataacaagcaataaaaataatttatgaacaatcatactctttttatggcggaagaaggtgaagaaacattacctcctttcatcaacattctggaaaacggagaaccggaagacggttttgaagaaaatggaacggatggtccggcaaaagtggctattgctccaaatccagatgatagtgaacatcgttgggatggatatttgaaaatcgacgaatcagccaattattatttccgtgtagatgcagatgataccggttccatcacgattaacgacaaaggtttcaccgtcagtaccggaggtggttctctgagtacccagcaaaagtccgtctatctggaacgtggctaccaccgttgccatattcaacacaatagcattgcttatgaaccggcggaaaactcctacgaagggtttgtggctttgacaagcaggtatgaaatcccggaaggagaatacgttaaatatcatactgataaatccaaacttgcggaaggcgatgggatacagctggtcaaattgtaccataaaaagaaaaaagcaaaatgcccgtgtgaagatggagattccagtggcggttcttgtcccgaatccgggagtgtggaattgacaatcagctttggccgcagcggcgttattgcaggcgttccttcagggcgcctcaaactgcatgaggaagttttggaggaaacgtcctttaccaggcaagcattttcctatgaacacgtttccatgcgtcatgtgagggaagccacggcccaacgagtagttgtggtaacggaaaatggagatagtcgctattaccggtggaacgaacagaagcagaatttttcaacgttccggaacagggcagattcatccggagctattacgcatgctggatgcccagggacagccttacaccggtgatattgcgggagcttactatttggaagaagtgactgatttggaagaatcctatcgttatctggcagagacgaaaaattctggaaagctacaagactgataccggaattcgtattccaatagaaaatatgggaatagaggttatccgtgactcggatggttccatccagcaaatttataatgtggtggatggtttgcttcatttatcggattattcggcccggcgtgtgctaatccaatggtatcctgcatctgccgtaggggacaaggatccggaaacagggttatattccataatgggagaaatgcgaaagcagtggaacatgggggctctgccggaagaggcggatttaccggaagttccccgtcattttgagctgcttgagcagaggggtggttctcctggcgcacccgtttatcgtagcttctggacttggataccggcaaatcctgcggaacaaaattttggagatcattgggaattcacgaggggagaaggcagtaattctgttacctcgaccaagctggtggaggaaatcagcgccaacgttactaaagaaacaacgctttctatggatgttgaaggaaatattctctcccgtcaggtggaaataaataacacatatgcctttggggattgtgtgacacgccgtgaatatggtgtagacccagacgtgcgggttaccgaatatgagtattgtctggaccgtgcctcttcccaatatggccgcatgattcgtatgacggatccacggggattggtgagcgagtacggatatgatgccaaggggcgtgaaatccgttcatcaagtccgtgggtgggaggcggttttaaggtaaaggaaaccacttggtcagacagcgcttttaatgattggcgtcccataatggaaacggaaaaaattgtggcggaagatggaacggaaaccgtgcttaataccaccgcctatgcttatgaggaaacaggacttatcaaacgggagactgttacccgtaccggtcttaactgtccgcatgccgctatgagtgttacggaatggtatggtggagatgaagaaaatgtttatgcccgggggcgtatgaaattggtccaacaggaggacggtgttcagactgcttatgactacgaggagacgtcggaatatggtgctgcctataaatgcgtggctacccaaatggtggcgaatgaaattgttcctggcaaatgcacgcgggacattacttggtacaatggagccgatcgcatggttgcccgtgaaactcaagcccataccggagagaattttgaatctttgggggtggagcaataccagctggatgaaacaggaaaagtggttctgacactccatgccgatggtagaagcagttccactatctgggattgctgcgggaaccctttggaagaaatcgatatcaatggagtttccacgcggtatgaatatgatgcagggcgccgcctgacccggcaaatacaggaacctacccctgttctggaagattacaatgcgccttgtcctacgttgacaaaacctcttgttactaccgagtatattcgcgatgccgcaggacgtgtggtggaacaaattactattacgggggatccggaagacaaggaatgccagcgtaaaagtgtcctgactacttatgacagtttgggaaggaccttgtcttccagtgatcccctggggtgtgtgacgcgctattcctattccccggatggcttggtcgcttccgtaactacatcgatgggagcaacccgtatcacgacatgccatccggacggttccctcttatctgagacgggaactgggcagcagaatcggtattatttctatgaattgacggcgcagggaatcaagactacggtccgtgtggatgccatgaatggcccggttctttcggaaagcatagaagatggttggggacgcatagtttccagtgctgtaccctcaggcaatggggccatggttgttacagaaacactttataatgagcaagggcaaattgcccggaagaaagaaacgggaagcgccccagtttttacggaatatgacgttctggggaatataacgcgccaatacgtcaagctttcggatgcggaggcagccgatcctttgcgtgaccggattcaggaaacggaagagggatatgttcatgaatttaatcttcctgtaccttgcgcggccggggccgtatactaccgaacagtggaaactctttataatgcacagggccaaccattggtgtcggaacataagaagcttgtatccgccatgcgggcagttgctcccggagagccattgctgatggaacatacggttaccaaggatgtacggggaaatgtttcagaaagctggacgctggataaggccggaaaccttgtttcatggagcagaactcccggctgtgtgcaggatgcccgaaccatttccgtagatggcgaacttttgcaaagcatgggtcatgacggagtgaaaacatgttatgcccatcgctatctcccggaaggtgatcttgtgcaagtggttgatgggcgcggcaatgtttccgtaacgcagagcaatttgaaaggccagactgtagccagtcaggatgctgttgaaaacgttaccgttcatcaatacgatacagtgacaggtcttctgctcaaaacgatccagccggatggcacgttcagcgagtatgcttatgatgtgcgggggcgtaagatggcacaatacggcacggcggaacagcctgttttgtttgaatatgatgaagctggccggatgacagcattgaccaccttccgtgttcctggaactgtagttacaggcaatccgtcagaccgtgtggacggcgatcgaacggagtggacttatgatccagctgccagcttgctcctgaaaaagacttatgccgatggctctcacgaggattatacttatgatgatttgggtcaattaattttgacaacaaaaccggacggcatgacagttgcgcgctcctatgtaccgttaacgggtgaacttgctgccgttacatacggggataatacgcaggatattgtctatgcctataatcatttagggcagctgaccaatgtgacggatgccttgggaacgcgtactttttcctacaaccagtatggtgaaaaggatagcgaaaatacgtctgggctttatgattccattctcatctggaagcgtgatgacttgggccgttcttccgggcatgtcctgtcttatcatggagttccggttcaggatatcacgctggcttatgacgatgaagggcgcctccatactgcgttgcctggcacggaagaagttcccttcacctgggactatgatccagccagtggtttgttgtcttccctggactaccccaatcctctcaagaaacttgtcatatgggatgaggatcggaatctggtgaccaaactggactattggcgccccaacagtgtcaattctccggttaaacatgaatatgattatgatcaattggggaggattgttcagaaacgtgattattggaatacgcccaatccgggcaggagtcattcttacacctataatgaccggggagaattgatcggagataagatggttcccggagcctctctggcgtatgcttacgataacatcggcaatcgggaaaatgtagcggatcaggggcagaaaacttatcagagcaatattctcaaccagtatacggatatcacccaggggcaggtatctttcctgcccgagtatgatgtgaatgggaaccaggttggtttaaaaacttccaccggagaatggacagtcatttataatgcggaaaatcgtcctgtaaactttacccatcgggatgggcaaacctccgtggtgtgtgtctatgattatatgggacgccgggtggaaaaagccgtctacgataatggagcactgcagaagaaattgcgatatatctataatggttatctgcagatcgcggagttggaagcaacaaggagtatggaagaagagcctccttcgttgaccaaaacgtatttctgggatccttctgaaactgtagctactcgtgtattaagcatgggattatggaatgaggatggaagctataaggagaccatttatttgacacatgacatgcagaaaaatgtaactgctgcctttggtattctgggtggacgccgtgcgttgtgggaatatggtccctatggcaatatcattaatagttccggaaatattgatggaataaatacctttctgtactccagtgaatattatgatgatgagttagcattgttttactacaattaccgttatttgaatccgctggatggcagatggctcagcagggatatggcagaagagcataatctgaaaaatctttatacgttccttcctacagggattgatgtgtgtggattatggtttgttgttggagataaggtaaataaaaatcaaagatctttcgggggcacaatatttttagatggaaaagggggtatagataaaactgctttaggagtagttgcgagtggcccatggaggaaatttgcattggaacatgaagaagagcatatacaacaagtccaacaagatgcaggaaactatgtttattacaaaccgtatttccgattatacaaaattgaaaagggaaagcttgtaaagaagaatggtgattttgtgtgttcgtgggcatattataatattaacaagctcacaaaagagcaaaataaaattaataataatttagaattttggccgcaagatacgaagataaggtatacttcaaacaaggagcaaaaagataaggagttaggtccaacaatacgggaaatgaataaagtggataaagctaaaggaggaaaaaaacatgaccgtaaaaaggcattgcaagaccaaatagaaatttatgaaaaaatcagtgacaatgacacgaaagttaatgttatttgggaagcatacatgaaacagtatgaaaaagaacgagataacttaaaaaatgctcaaggcagtgaagaagccccttggaaatggtataatgaagcccatgtgaatcctgatttaataaatataatctctgggaaataagatgaatattaattttctattggtatttttaataataggactgtgtggaatagcccctgcagaaggagcacggcgaatgataggccctattgggtattctgtgatggatttattagaacccccaaatcccggatattccgatagaaaatatcctcccatcaatggaagatggaatgaacaaaagttaatcgaatttaatgatcatcaatatttgcaatggaaactaattcttaattgtgaagaatggactgacgcgccccgcggaacaaaccggaagcaggaaaagtttttgaatctcctttccgggttctatccaaaaaagaattatgatgaaacgaacgaccgagaatggaccgacattcaatatgcgttgtgcatttacacctatttcaccgcggatgggaaaatctgtgaccttgacgaccagggttaccacatgcgggtagtggaagagaatggggggcggaggtgcgttactttttatggtgtccggggagaagatgccctttgtgtgaatggttatcaccggggagaggttatttgtcaggcagaggcagggattttcaatggccctttcattttcagggaatccttttttggaaaaggagatgattctggaagtaccgtaagccaggagcctgtagatgtggaacgtccggccatttttccgaaaggacgaatggttcgttaccatcaatataaggcaacgcccgccgaggaggcgggcgttgcctgcctggaagtttataaaggatgggaggcggaattgacagcttctacaagaaaaacattttatttaaaaggaagattcggagattggaacgatatcgatcaattgcggttacgccttcctgaagatttgcttcaagcaaagtattatctggagccttatgatgtagctgaagcggaatatacggacaagtttggccggttgactcgtggccttcaggggtgggcccggcgttgtgcagaccattatgaacctgggagtgatttgggaggaggccgtgccgtgaaggaaattcgttattacgacgaaaacggagaattaagttccgatcatcagaggaggtgtgcgatcatccgtttttcttatccggagaagggagttcaacagattgcttattttgatgaacacggcagggaactgaaacagttgaaaaaagaagagaaaggtcttttggaaactttggacagggatacatccgattcctatacgtattattccatgcttgatgaggatgtgaccgtgtatgaggccgataatcgggatgatggagaagaggtaaagaatgatgaggactaacggagacggataaagcgttcagctcggctttttcattggcagactgtcctttcttcaaattaaatgaaggagcaaaagagtttttcacaggatggttttttcttctggttgatgaagggacaaagcaaaattttaaaaatatacgatttaattaattaaattttatgtttgttgtatccgatattttaaaggtatttatattgttcttgcttatttttctgctgtttatttccatctttttcaatatacttttaatgaatggaattagagagatgcgtgaattgacgccgggttgcctttacaaaatggttttgcgggtagaacagtgggggaagagcaattgggaggaagggtatcgggttcctccgggtgatcctcggagcgtttacgccatgtgtaaaattcctcgcggaatctctgttaatattgatcgatttgataataaagggttatgggtaggtttaattattaatgataaatactggataaattattatagtaaatctcctgatgagtttgttatccaatatgactccttactttcgaattgatctatgaatgagactgaatgcgtggcagatgctggaaccgcgccaaggcgtttttggatgaagaaagcactcatcgttttaggaggattgctttttatatccattttcataaacgtaatactctggtttaaaacaatgcaggaaatgcatacaagcgtttcttccgtaaaagaagaattggaggaagtcagtttgtgggttcaagctttcaaaaaaaagcatggaagtttgccgtcaattcaggagcaggttgaatacggaatgaagggattaaagtatgaagggttggatatgagcatcttggaagagaaggatggtatttatataggttttgaaatgaaggataactataagggagtatacgacgtatccttgcaccgggtcatgttcgacaaggaaacgttggaaaaatggcgccggaatgatagtaaataattccatgattttttcttccttactcaatatactttttggatatagcatttaatttagcagtagcttattcattatttaatgtgattgaagtacatctaataaaaatgaagtatggttaagtgtgatgaaggcatggtatgaaaatggattagtgaagatcatatacatccagaattaaaatatgaaatattataaatacgcttttttaatatgccttggtctcttttctccggtggagggcaggttgatgatcaatagagaggcttatgcatccattgtagggtatgctgataccatgcgtaattatccttcctatgatgattcccggtatcctgatttcgacggtagggatgtaaatctggagcctttggaatggcgtgggcgagaacagtatttgagattaagcatcactttatggcatatgggaagactttcggcggagaaggctgctcaaacaggttttttaggacttttgtcccagttttaccccaagaaagtttatgatgtgggccggaataattttcgtcatacggaagatcatcagatatatcaggaactgtttttttccaaagacggaaaaatatgtgaactggaagatttgggatttcatttaaggatagtagaacgtaacagaggttaccaaagcgtcacgttttatgatgcgtccggaaaaccatgtccgtgtcttcacggatataaccggggagatgtattggtcaaaggagatgctgtcatcaaagaaacattctttgatacgtccgatgaaccggttgatatttcccgtccggcggtttttcctgttggaaacatgattcattatcatcagtataaagccactcccgcttttaaggcgggggtggtgtgccgtgaagtacacaagggatgggaggcggaagtaacatcttctggccgaaagactttttatttaaaggggagatttggagattttaatgatgaatatgaaagatggctctatcttcctgaggatctactgcggtccagatattatctggaaccctacgatatggaggaagcggaatatacggacaagtttggccggttgactcgtggcctccaggggtgggcccggcgttgcgtagaccattatgaacctgggagtgatttgggaggaggccgtgccgtgaaggaaatccgctattacgacgaaaacggagagttaagttccgatcatcagaggaggtgtgcgatcatccgtttttcctatccggaacatggattccagcagatcagttattttgatgagcatggcagggaattgaagcattttcaaaaagcaagggaagggcctttggaaaaggaagagccatatagttactattccatgttaaacgaagatgttacctgctatgagcccgacaaccgggatgaaggggaaataatagagcgtgaggcggactagcggagagaggataaagcggccgtccatcttttcctggagatgctcgcgctttcatcaaattaaataagacgggcagtctttccgtagaatgattactccagactgtgggaggaattgtttatccggttccctggggtttgcttccatgcttccgtgacctaaaaaagtattgccaatgctggggaatacgttattttgcgtgtgttgagagtgactgccaagcggtagccggagccccttaagggagtgcggcgtgttccccggcagagtatccggtccctgtaacctatttacggatggccgcaccctgattcccttcctgcgtggtatttgcgaaagacaatgtgttagcccgggttgaagaacagttccacttgttagtttgtctcttttcacatacacttactattattcccaattctatgtcaggacataataaatggtctaagatcaagtacgttaaggctaaggaagatgccaagaagggcaaggtgtttgcccgctttgcccatgaaatcatgctggccgccaagagcggcggcggagatcctgatctgaaccctcgcctgagggccgccattgacggggccaaggccgtgtccacccccaaggagaatattgaacgcgccatcaagaaaggcaccggggaactgggcggcgccaccatccaggagattacttatgaaggctacggcccggcgggtacggctttcctgattgaagtggcgacggacaacacgaaccgttccgcttccgagctgcgcactctgtttaccaagaacgggggcagcatcggcactcccggttccgtagcctaccagtttgaacgcaagggagaagcccgcatcatggcggaaggcctgacggaggattccgcgatggacctggcgctggaatgcggcgcggacgatgtggagcagggtgattccgacaatgaatgggtgtttgttacggacccgacggaattgaacaatgtgtgcgccgccctgcgcgaggccgggcatacggtgatttccatgaagctgatttccgtggcgcagaacgtttccgtaattaacgatctggagacggcgaaggccgccctgcgcttgtatgaagcgctggacgattacgatgacgcgctgaacgtcttctccaatttcgacgtggcggaagaaatcctcgaacagcttgactaacgccgttgtctttcaggagactcctgttgttgcagtccaattttcttttccatgtctgatacccccccagatttgactccggaacaggtttctccggagccatcgcccaaaaaacgtattgtccgcagagccaagtctgcggcggaagctccggcagagtcccacgccgctgcggaagtttccgggacggaacagggttcttccccggccccccgcaagcggacggcaaggaagaaggttccggaattggcgggtgaagggatggagagcacggatgcgccgcagaagaagagcgcccgcaaaagcagcgctgaaattccggcggcggaagggacggaggaagctcctgccaagccccggcgcggacgtccccgcaagaagcccgtggaggaagttccggaaactgccggttcccctgatgttcccgtaacggaagctcccgtcaagccggtgcgcaggcgttccgccaagaccattgcgcctgaagacgatgccgcagagggcgccaaaacggacgctgccgtttccatggcgcctgccgaaccggccgccagtcctgcggattctgctccggaacagcccgaaggaggcaggccgaaggtgatccgccagaggtttgtgagaaaaccgcgggtacaggagacggggccggatgcggattctgccgctccgtccatcaaggtggtacaggaaggcgcgacggatttctccggagatgccgcgcgggaatcccatcggacgaatgaaccgcaaaggcagcgttttgagagacagaaccgccgcaataacaacgaccgtttcaataagaaccggaacaaccggcaggacggccgcaatggcaggaacggcaatgaccgggttaaaaaccgctggaacaataatcaccaggaggggaatgctccccagaataatgctccccgtgagctggcgcccccggaaccggtggacggcctgctggaaatcacgaataagggattcggctttttaaggaagccggataatgattttgacgcttttgcggaagccgtgtacgttccgcaggacatgatccgcaagttcggcctgcgccccgccgtttgggtgcatggacaagcctgccgccatgaccgcggcattcttctgacggagatatccgccgtcaacggagatgcgccggagaaggcccgcaagagccctcattttgaagagctcaaggcggtcaatccgaataagcgcatttcctttgaaacccgtccggagcgctataccacgcgcacgctggacctgattgcgccgatcgggcgcggccagcgcggcctgatcgtttctccgccccgcgcggggaagacgacgctgttgcagcacatggcggaagccattctggagaattacaaggattccatccacctgatggtgctgctggtggacgaacgcccggaagaagtgacggagttcaagcgttcccttcccggagccgaggtgtacgcctcttccaatgacggcagggtgcgtgaccactgccgcatggcggagctttgcattgagcgcgccaagcggcttgtggaagccggccagcatgtcttcctgctgatggattccatcacgcgccttgcccgtgcctataataacgcggacaaggggagcggccgcaccatgtccggcggcattgatgcccgtgcgctggaaatgccccgccgtctttttgccgccgcccgcaatacgcgccaggccggttccctgaccatcatcgccactgcactcgtggaaaccaacagccgtatggatgacctgattttccaggagttcaagggtacgggcaacatggagcttgttctgaaccgccgcattgcggagcagtatatcttcccggccgtggatatcctcaaatcgggaacgcgccgggaagaactcatcatgccggaagcgtggctgtacaagatgaacctgatccgccgcgcgctggcggggcacaagcctgtagaggccatggaacgcttcctgtttttcctgaacaagtacccaagcaacgcccagatgctgttggacctgaagcagaaggcataagctgccggaatgatggggcgaagagctccacgcaggatgcctgccagggaatattttcctttgactatacaagggcgttttcaaacgccctttttgctgtcccaaatggcgatgtgcaggcggtctgaaaagcggaggccataacggaggcaccattccaccgtctgcgcgcgcatggcgtccagctctgcccgtgtggaggccagtggcatgagcaggatgcgttctgcgggaatgtctgccccggaagcctgccgcagggcggtttttacatcttcctcgcacgccactacgaatttgaaccacgctttttccgtggaagccagacggcgcaggatgtccggtttccatgttctggcggtttcattgccggagtgggggagtttgggagacacgttgaattgcgtgatgcgttccagcagttccgcatccggcataatggtgccgttggtttccagctccacggcatggtccggcagcaggcgcagcagggcgggaagggctttttgctgaatgagcggttctcccccggtcagtaccaggcggcggcatggataacggagcgccagttccgccgccttttcaggcgtgagccgcactccaggaactgtcccgttccaggagtacgccgtgtcacaccaggaacaggccaggttgcagcctgccaggcgcagaaagacgcagggagtcccctgggagacgccttccccctggatggaatggaaaatttccggttgtccgtgaagctgggccagtgtgagcatgatcaggcaggcctgagactaccatatccctgccgcccgtcaacgcctccctgcggagggcgccggaagagcggcaaacgggacgcaggagcttttcttcattccgtgccctcaagttttcaggaacacgctcaaccgttgctgcggcggaaggcccccaccgtgaacaggaggaggatgaatcccacaacggaggcagcgcccgtgaacagcttctggaaggaggcatggtccttttcctccttctccagctttttcacttcttctctggaagacttgcgcatttcagctcgggcctcgtcataggtccgggacgcctgttcctcttctttccgggcttgttccagagcgttccggacggctttggactgctccctgtatccggctgtagccagcaaatcgtcatctcccgggtccggggcggcggtttcttcccggtcatcgtcggttaaggccttgtttttctgttcggtgagtttttcctccgctttctgcatcagtagctgctgcttgccggttttttcttccagggcttccagggcggcgtccagagcctgcatttttttctttgtggcggaggttttcaggcgaatgaaggctatttgcgattgaagttccgagatgttctccttctggggagcggctcctgaaaatttctttttggctttggcatcctcccggttcttggccagttcccgttcggcctgccccagttccgcctgaatacttctctgcttgtcggccaacttcgcaagcagggttttcattccctccctcttttgaagcagttcttccctggcggacttggagttttccctctgcctgctcatgcggcggcgcaactggtcaatcctctggtcgtgttccttcacttcctcctgctggtccgccatgcttttttggtaggcggcaacctgggcttcctgctgctgctgtcttttctgctcaagataggtttcctggaatttttccatggcctcttccgccgtccgggtggcgtcctgggcttcatccagtttcttccgggtctggctgacggttttctccaatactacggcctcctgttccatggctgttttccgggcggccagttcctttccttccggggagatatggtgttgatagtaccagacggagaatccggcggttaaaatggtcaggagaagcagtacatagcgcatgagagtgttccaacgattcgggtaaaagtacaaaaaggagtgtgccttgtcaacatggcagaaataaaggcaacccgcctccctccggaaatggagggaaagcgggctgcctggaaggcgggttccggaagagtccggaaatgagtctaattcctgttaaagattcagggagaaggcggagatggcatctatctcttccgcaatcttgttcagcagttcatcggaaacgggtttgttggtcttgaggacggccagggcttcccgcgtggcgtgatcggccggagcggcgatgttgtcaatgttgatgccgttggagtacagggcggaaccgatggtggcgatgatgccgggacggtccttgtaatgcaggaacagcgttgtgccgcgcaggtccgcatacagcccgttgaagttgttcaggcgggagaccatgggaatgccttccgtcaccacgccgcgcacgctggtgttgaaatattccccctcatcttccatcaccacgtccagcgtgatggaatcttcatagggcttgtcgtccttgggctcccgcgccttgaagacgatgccgtgctcccgcagggattcttccgcggcggcgggcatgaggcccttttccgcgtgcggcagcagcccttccagaatgggggcagtgaaccatttgcggaagacgcgcaagttgccgtagaaggtgcattccacccggcggataggcttgttgcctccggctttgcgggccagggcagcgagcaggaaagccagttggagatgggccggattgagaccgttgggggattccccgttcaccacgcaggaggtgtctccgtcagagaaataggccaccatctgttccgcggcgcgcttggccgccttcgtgttggcctcccgggtgttggcgcccaggtggggaaggatgaggtccgccacggcggcggaaggtttttctccgggcgcgtccttggagtggacgtccgtcaggtagccgatgtttttgcccgcggccttggcggcggccagcgcttcttcatccaccacgccgtagcgggagcaattgatgagcaccgcgccgtccttcatgctgtcgataagttccgcgttcaccatgtggtgggtggagggaccgcccggaacgtgcagggtgatgatgtcgcactgggagaagatgtcttcaatgctggtgggggtgacgccgatgttcagggcgcgctggcgggccagaaagtggtcgtagcccagcagggtgggttcaaatccctggaggcgcttgacgaggttgcggccgatgttgcccaggccgataatgccgacggtttttttggtcagctcgctgcccatgtattttttcttttcccacaggccttcccgggtggtggcgtccgcctggacgatgtggcggtaatacgccagaatcatggccatgacttcctccgccacggcgttggagttggcgccgggggtgttcatgacgtccacattcttcttgcgggcgtacacgatgtcaatgttgtcgtagccggctccggcgcggatgaccagcttcagggagggtagggcgtccatgattgccggagtgactttttcactgcggacgatcagggccacggtgtccggatgggcggcggcctgttcttccagaggcgtgtcggcgtcctggacgacttcatagccggccgttttaagcgtattggccgctacgtcggagagtttggtgggaataagaaccttgttcatgttggtatggtggaaaatgtcattgttcaatggtatggacaaaaagtccgctgcgcagcttgggctcaaaccacgtggacttggggggcatgatttccccggcgtccgccacgcggaagaggtcgtccatggtgacggggtacagggagaaggccagcgccatttctccggagcagcggcgttccagttctcccaggccgcggatgccgcctacgaagtcgatgcggtcgctcgtgcgcggatcgtcaatgcccaggatgggggccagcacattcgcctggagaatggcgcagtccaggctttcgatgggatggtccgccgggaaggttcccggtttggcggtgagggaataccaccggccgtccagatacatgccgaattcgtgcttggcgcggggggcatagccttctccgggaacggcgtccgcaggcgccacgtcaaaggaggcgcggagcttttccaggagttcttccttggccaggccgttcagatcgcgcacaacgcggttgtagtccatgatgaagaggtcttcatcacagaagacgacggccatcaggtaattgaattcctcctgtcccgtgtagtccgggtgctccttgcgccgactggcggaaacggcggcgctggacgccgtacggtgatggccgtccgctatgtaaagagcatccacttcttcaaagcctttgcggatggcttccaccgtgccgggatcggagacgggccacaggatgtgggtgacgccgtcttccgtggtgaaatcgtactccggtttgtggaacttgatccattcccggatgatgccggaaaggctctcgtgcttgcggtaggccaggaataccggttccgtctgggcggaacaggcgtcaaagtgctcaatgcggtccagctccttttccctgcgggtcagttcatgctttttgatgacgccgctggcgtattcatccacggaggcgcagccgacgatgcccgtctgcacgcggccccacatgatctggcggtaaatgtagaaggaaggtttttcatcccggacgaggtagcccttgcggacgaatgcttccaggttttcccgcgccttggcataggtttccggggcgtggatggcggcttcgctcgtgtcgatgtcggagcggcagatatggaggaaggaggcgtcgtttccggcggccatttccctggcctcccggtggttcatgacgtcataggggagggaggaaacccgcgcggccagttcccggggcggacggagggcggggaagggatggagagtggacatggaaaaatgagagagtacagaaggttaatgacggagggagcaatgatatagcgcacggatgccggagacaagccccgccaaaatacatgccgcaatgaacagcagcaggtaccgcatgggcgttcctgccgctttgagaaaatccaggggcttgaacaggaaaagccggacaaactctccgcctcccggaatgctgttcaacagcaggagcatcccgatgagcagcaggaacaggcttgtcgcggcggccatgctccatgtgcaggagcgcgccatttcccccgcctgttcccggtccaggcgttttttcaccaggatcaggtagtacggaacgagcattagaaagaaggctccggaccaggggcgcatggcttcattcaaggctccggcgatgatgagggccgtcaggacgcaggcggaggcgatgatgaacagagcctggagcgccgtgtgaagaaccttgttcatggcggctgttccgttcattctccggaggaggcgttcttccctctttcccgggcggggccggaaaagagggaagggaaaacgcttacttgagtttcaggatgtccacgatgttggacgtgatggagcgcatgtcgtccatcgtcagctcacccatgtgggcgatgcggaaggtcttgttcttcaaatccccgtaaccgttgccgagctgcatgccgcgttcaatcagcacgttgttcagggcggcgatgtcaatgtccctcgtgttgctgatgaccgtcagggtgcgggaaagatggtcccggttggcgaagacgctgaaatattcatccgcccaggagcgcacgaattccgccatggcctcatggcgcgcaaagcggttttccacgccttcctgcatgatgcgctggagctggaggtccatggcgtacatgatggagacgcagggggtgttcgtgtactggtagtcctttttctggatagtgtcgtaaatggagcgcaggtcaaagtagcaaccgcggttggggacggaggcggtgcgttcataagccttttgggacagcgtgcagacagccatgccgggggggagcgccagcgccttctgggtggaggtcaccagcacgtccacgcccagcttgtccgtttcaatccgggagccggcggcggaacttaccgcgtccatgcaccatacgacgtccgggtattttttgagtacttccgcaatttcctccaccgggttctggatgccggtggacgtttcattatgggtgatgcagatagtgtcgtacttgccggtggagagggcggcgtccaccatttccggggtggtgggctggccgagttcgctcttgaaaatgtcggagggaacgccgttgcccgtggcaatcttgtaccatttgtcgccgaaggcgcccacggaaaaaatggcggctcgcttggcggtgcaggaacgcacggcgccttccatcaggcccgtaccggaggaagtggagagcaggatttcctgttccgtcagcagaatgcggcgcagattgttggaaatgcggcgctgcagggcggaagccgccttggatcggtgccccatcatcgggccgctcatggcggcaagtacttcaggtgctacttcagtgggtccgggaatgaataatttggttgccatttgttttaaaaactgggtacgtgtactatagcgtctccaaacggtttggctatgaatttttgttggggcaggctgggaaaacctgccgcagcagcgggaataggagcggtttactgcccggatccgccgggaaacgaatgataaatccggaatcaggggctgctttttatctcaaggaactcatgttgagtagccgtttctctgttggaaaccgttccgttgcggatgaaacggcctttttgcttccgtacggggaggaaacgcggatgcatgctccccccgcaggcgaaaggtctttgaagtttagaagctgatgagcttgaccagccagtagccgccgaagaagagccagacgtacaggaggcccgcaagcaggaaggggcgcgctccggctttcttgaacttctcaaagctggattctgcgcccagagccgtcatcgccatggtcagcaggaacgtgtccagggtgttgatggcgtccaccagttcggcaggcagcaggtgcagggaattgaagccgatgacggcgaggaacaggaacgcgaaccaggggatggtgattttacgtttttcgctgtttcctccggcggcggagtcccgccgcgccaggatgatgctcaggatgaccagcaccggggccagcatcatcacgcggatcatcttgacgatgatggccgggtcggagatggcctgccccatggcgttgccggcgcccaccacgtgggccacttcatgaagggtggctccggtaaagaggcccatctgttccgtcgtcaggttcagcattccggcccggtacagggccggatacaggaacatggatagcgtgccgaagatgacgacggtggaaacggccacggccgccttgtaaggcttgcttttcacgacgggttccgcgcccaggacggccgccgccccgcagatggaactgccgatggaggtcagaagggccgtgtcccggtccattttcagcagccgccccagtcccgcgcccagcagaatggtgagggagaccacaatgaggtcgatcagaagagccgcgcccccgatgtcgatcacgctctggaaggtcagcttgaacccgtacaggacgatgcctgttctcagcacctgcttggtgcagaactggatgccgggcacccacgcttccggaaggtggttgcgcaggctgttggcgtaaagcatccccagcacgatgccgacgatcagcgggctgaaggagaggtgtttcacccattcaaagtccgcaatgtagaaggcggaaaaggagaacaggacgatgagcaggatgccgtggagcggattggcgagatgtttgggggacatgggctgtagaatgatggctgcggccgcccgtcttgtccggagggggaacgtgccggaacggctgcgtgggagatatactccacaatcatcataaaatctaatcagaaattgttataggcgattagattttgttataataattccggcagaatttgatgaataattcattgattctgctgtagtctccgtgcccgttggcaaagtggaaggaacggcggatttccagatggcggagatggatttttttcaaatccccgcgtttgagctcttcccgcacggcgagggaggagagaaaagagcatgccggggaatgcgccagatacatcttgatgctttccgtattgcccagcgtcatcaggacgtggaggccggaagcggcgattccgtgtttcttcaggacttcctctaccacccggcgcgtgccggaccccggttcccgcatgatcaggggaacatgggagagctgcgggagggagaggccttcccgcggggcggcggcatgaggaccgcccgccagaatgatttcatcctccatgaagggcaggtaatgcaggtccgtgcgccttgcagtgccttccacgatgccgagctgcacggcttcatcctgcacggcctgttcgatttcctccgtattgccgcttttcagccgtatgcgtatttccggataatggcggttgaacagggccagcagcggaggcaggacgtactgggacatggtggagctggctcccaggctcaattcaccggaaacgggcgtattccggccggaagacatgtcctccgccagcgtttcatattccttgaggatgcggcgggaatggaccagcaggcgcacgccttccgccgtcagggcgatgccgcggccctcccttttgaacaggcgggcgtccagcaggcgttccagctccttgatatgccgggtgacggccggctgcgtgatgaacagctcctccgccgcgcgcgtgaagttcaggcgccgcgcgacggtctcaaacactttcagccggaaatccgtaatcatggagaaggcatgcattcaaccacgcctccgcgttcccggcaagctcctttccttcatgcggttgcccgttgaaaagaaaaggccgtgaaatccggatgatgacatgatggcggctcgtgcggggaagccggaaggaagagaacaggagcagcatgagcatgagatggcggattatggccgcggcggcattttgcgtggccgggtgggcttccggggatgtgccgtccgatccttccagggagtttttactgccttccggaacgttgaaggcgtttgccgaatatataccagcctatggaaaaggtgcggttcctggtccggaggggacggagcctgtccgtctggaacaagcgatagacgccacccgggcggcgaaggatgcccgtgcgctgaaggaagccgccgccgcactggacgcctattggcagtcccggctggatgctctttatgctcccgtagccgcctggttggcttcacggtggtttgtaaagtcggaattgattgaacatcaatcaaagtggtttaaggaaatgcctcttcaggaattgcaggatgaaatagtgatggagtcctgggtgcaggcgcaggtggcttgggaggcatttttaagagcggatgagaggttttacagggcgtggatgctggccgaccaaaaccggcgctctgccatgaagggggagggcgtacccgatgccgggtcattgggagtgctggaggaggcggaagtccatgtgcgccgggccttcaagaagatggaacggatgatggctattgcggatacggcctgcgcgacgaatgcctacccgctggtggacgttgcgcccgttgatcccggctggcaggagaatgaccccgtgctgcaaaaggtggaacaggccgtttgttcttctgaatatcccttcgtcaagttcctgctgggctcctaccggaattactggaaggcccggctgtccggtatccggacggctttcttgccggagaatggctgcagtttcatgcgtaccggatgggaggacaggctccgggaggcggaccgggcgtggcggcgttatgtggttttttccgtggagtatgaaattcagcccggcatttatttctggagttccgggataggcatttacatgacggcgcatgagtcgtggctgtaccgccagaggtgccgggatttgctggccgtcgcggggctggtaccggagagaagatcagagggcttcaccagcccggtccgggattttgccggctttggggaagcgagtctgatcgcggagcgcatggcagcagccggaggatcgtccgctgcggcttaccgaaaattatctgaaaacctggaaaggctgcgcacggatttattcagttcggtttctccctggccagccgtttttttggccgtggaaacgggagatgagagcatgcttcgttttctgatgtcccggcttcgcctgtccggggaggatatgcttccgggcggtacgacgactcccctgatgaaggccgttgtctcccgatccgttcccctggcggatattctggtttcgtgccgggagctgctcaatgcggtggatgccaggggccgtacggcgctggacatggcgctggagcgcggggatggggagatggccgtgttgctgcggcgtcacggaggcatcaccggagaagaacggaaaaaggagagagaacattcctccccttcctctccgcctgcgtatgactgagccggagccgggaacgtttttcagaactggtgcgggaggtcattcccggcaggtttttttgttggaaggggaatggtttttgttaatgccgccttacctgcccggagcatggttgtccggaatattccggagggtgcaagggctggaagaggtcccgatggtttccggcgtgcagcaacgcgttcaagacggagataagacaaacgggcggaagttctgtcattcataaacgtttctgtttgaaaataagtgaatttggaaagttttcacggcacagtggaagttcccggaaccgtgcatcgtctgaacggaacgagacgggagggaatcaaatgcctatatgaaactgcattccatgatcattgtcggcggagccggccttttgctgttgggggcctgttccccttcttcctatcagaccacgttcccggaaccggcctatgtgaaggtttccaccaataacggagcctatgcgccttatccggacaaccccatcggccagcaggaactggtgtactggtatgattcccttactacccccatgacggtggtggcggaagtaccgcccactcccatcgtcaccaagggccccggcccggtgatccttgattccaacgatttctccgcgaagctgtaccgggacagaacggaaatcaagaagaaggacaaggatggcaactgggtcaccagcgtgcgccccaccactcccgctgaccagcgcatgaggaattatgtgatggcttccaagaaagcccgttaatcttttcctccgttaaattcacgaaaacctgtccggcctgctttcctctccggaggaagcaggcccggcttgtttacaggcaggtttttcttcccattcatccgcggaaacgggacggcggcgaacgcttttccccggccatgggagataggcgtccgtataaaaggaggagccgcagccccggcattccagcatgatgcctgtatccggccttccctgttcctccggcgtctgcgaggcggggcgaagcccggcatgcccgcagtgtgggcagcggatggggagaggggcggcatattgaatcatcagaactgccgtgcagacgagcgcccaggcaatgtaaccggcccagaaaggccattccggattcagcagccagattgccgtgacgacgggaatggagcacagggcatatagcagggtgcgcttctgcctcgtggccaggaggtggaagcagtagatcgtatcctgcatgaaaggggggaaggaaacggttacagatccttcagggtccattcatccttccattccagaatgatctggtcgccgtcccatttcatgggaagccacatgtggcggccgtcaatggcgtttttaggccgccagatgtccgccatgaagatgaatttgccgggcttgccctgtacgggcaggatgtaggtgctttgtccgccgaaggtgatattggccttgggccccacgcagggatttttgagctccgtccacggtccggccatgcggggggccacggcgctgcgggccgcgttgggcgcccagccggagcagccggaggcgatcatgtagtatttcccgttgtgcttgcagatggcgggagcttccatgtagcggttgacgaagacgcggacgtattttccgttatgcccggtgtagtccggcgtcagttccgcgatgtgcagggtgatgttcccttcggaggagtaaatatggtaggccttgccgttgtcgtccacaaagatggtcatgtcccggctcatctggccgccggggaagtccctgcggatgatgcggacatagtcaggcatctccttggtgaactcggtcgtctggtcctttttgtccagattcaggggccatttgcctggattgacgcgcccggctttcaggaacgtgaacggtccggtgggctttgtggccgtagccacgcccgcgtacgcggaaccgtagcccttccccctgagttccaggtggaaccacatcacgtactttttggtcttcttgttgtagactaccttggggcgttccaggatgcagcccttggcgatggggtgggagttgtccccttccaccactttcagggcgattccttcgtccttccagttgtaaaggtccctggaggaatagcagtgcacgcccacctgggcgcggtttccggcgtccccctccaccttgtgctccccgtaccagtagtaggtgcccttgtcgtacaggatgccgccgccgtgggcgttgatgtgcacgccgttgttgtccgtccagatttcaccgggcttgaaggacgtgtgtttgacgggggcgtcagccgtggcaacggaggagaggcagcaggccagcccggcaaaaaaggtgagcagcagtgttttcatgcgtgttggcggtgaatcgggttacatgtcttccagtttccattcgtctttccattccagtttgatctggtctccgtcaaactggatgggaagccacatatagcggccgtcaatggcgttctggggccgccagatgtccgccatgaagatgaatttgccgggtttgccctgtacgggcaggatgtaggtgctctgtccgccgaaggtgctcccggccttgggacccacgcaggggtttttgagctccgtccacggtccggcaatgcggggagccacggcgctgcgggcggcgttgggcgcccagcccgtgcatccggaggcgatgaagtagtatttgcccttgtgcttgaagatggcgggagcttccatgaagcggccggggaagacgcggacgaatttgccggtgtgctccgtgtagtccggagtcagttccgcgatgtgggtagtgctgttttcctcggaggaatagatgtggtaggccttgccgtcgtcatccacaaagatggtcatgtcacggctcatctgtcctttttcaaagtctttcttgaacatgtcctcggaacgcacgccttccggcagggcgctggaggtcaggccgggcactcccttgaacgttttcatggtctggtccttcttgtccatgttcatgggccatttgcccggattgacgcgcccggctttcaggaacgtgaacgggccggtgggctttgtggccgtagccacgcccgcataggccgcgccatagccttttcccttgagctccagatggaaccacatcacgtactttttggtcttcttgttgtagactaccttggggcgttccaggatgcagcccttggcgatggggtgggagttgtccccttccaccactttcagggcgattccttcgtccttccagttgtacaggtccctggaggaatagcagtgcacgcccacctgggcgcggtttccggcgtccccctccaccttgtgttctccgtaccagtagtaggtgcccttgtcgtacaggatgccgccgccgtgggcattgatgtgcacgccgttgttgtccgtccagatttcaccgggcttgaaggacgtgtgccggaccggcgtttccgcggtggaaacggcggccgcgccgcagaacaggcagagcgccagaagggatttcatggtgtttgtcatggccggaatggtgtggaagtaagggatgaaggcggttccggctgtccgtacaacttgtcccacgcgcgggaaagggcgtaaagggcgtagccggtgccgtagaatttgtgataattgtacagggggtaatcccaccaggaaccgtctgttccctgacgggtgaggatgtcgtccgccaatagagacgcatggcgttttacctgatttggggccagcatgtccagacacattcctgaataatagtatccgtagtagaaaaagtagccggaattctgggcgaaactttcatggggagtgggcttgtgcagggccatcgtcagccatccccggcggctccacaggcggtccagtccgtccacgagctggcgcagggagatgtcctccggctcccagagcctgatggcgtagtcacaggcgggggtgcgtgccaggctgccggtgtggcggttgatgggccggctgggatagaaggcatgccccagggaatagacgtaggttcccgccggcgtcctctgggatttgaggaatttcaacgcgcggctgaatattttgttgtccagcgacaggccgaatgattttccggccatccaggcggagatgaggacggtccccgtcaggaaggaggtaggctgcgccgcaggccgtttgctgaagccggaataggtgaggtagccccagccccccatggcggaagccagctcattgagctttttcacctgggcgccggcgcagcttttcagctcccggtagcgcgggctgttccggtccagtcttgcggcccgcatgctcatggcgtccagcacgtaggtatgcgcccaggtattgtacacgcaaagggagtcgccgcgcttcaaatggggcatcgtacggatcaggtagttttccgcgcgggtcatggcctgctgcacggcgggttcgttgtgcagggggctggcgttaagccccgcaatgcacagggcggtgcttgccgtcttgaaggtgagcgggccgtccggataggggcagaggatgttccaggtgccgatcacccggtggtcgccccaggagccgtccctgttctgcgttttcagcaggaagtctacgccgcggcggaacgcctggtcaaattgttcgggtttcgcgggcgggatgtccgggattttggcgatctggatggcatccgccttttccgcctgcgcgggtttcccgtgcgctgcgggaagatgcaggcacagaatcgcgagaaggctggtcgtcagcaggcggaacatgggtcaggaggccgttgcggcattggaagggtacagggattccctgacgcgggagacggcgtacagggcatagccggtaccgtagaatttatggtagttatacaggggatagtcccaccaggagccgtctttttcctgcatgggcaggaggtcgcttgccagatgggaggcatggcgcgccagatgttccggggccacttcctccaggcagcgggcggcgtaataatacccgtagtaaaagaagtagcccgcgttctgggcaaagctttcatggggaatgggctttttcacggccagggaaagccagccgccgcggctccagatgcgttccaggccgtcttccaactgccgcctggagatgaaagccgggtcataccgcatcagggccaggtctccggcgggggtgcgggccagactgccggtgtggcggttgatgggccggccgggatagaaggagtgggaaagggaatagacgtagctgccggcaggggtccgcagtttttccaggcaggcgacggcgcgtttgacgactcgggcatccggcttgaggccgaaggcctgttccgagtccttgtaggcgagcaggaccgtagccgtcaggaaggaggtgggctctccgatgggacgtttggaaaaggtttcaaacgtataatagccccagccgccctggacgtccgccatctggtccagcgccttgacctgaaggccggccactttttttagttccgcatacaggggggaatccgcaggaagattgcgggccgcccggctcagggcggagaggccgtaggcatggccccagacgccgagcacggtgcgcgtgtctccccgtttcagggtgggcagcgtggttagcaggtactgcacggccttgtccagcgcggccttgacggcggggtcctccttcagggggctggtgagcaggccgattacgcacagggaggtggaggccgttctgaacgacctgggcccttccgggtaggggcagatgacgttcagccccttggtgcgcgtatggcttccccaggagccgtccctgttctgttccttcagcaggaagtccgccgcctttcggatggaggcgtccagggtttcccgggagggcggcggaacgtccggcaccctggcaatgggaatggtatcccttttttccgcgttttccgccggaatggaggcgcagagcgccgtgctggcccccagggcggcgagaaaaaagacggctttattcatggaggtccgtagggggatcaggcctgctggtccttgatggtgacctggacggggaggccgggagcgaagatctggctggcgggaaccttgggcgtgatgatgatgcggcgcttgccgtccgcccccggaatggggctggcttccgtaatgacgccgggaatctgcatgttcgttaccttgatgacgacggcttcccccaccttgggcgtggcggtggagtccggcagcgtggcctgcacgatcagttccgagttcggcgggacgatggtggcgattttgtcaaaggcttccagcttgccgccgggcttgagcttttccgccaccggaatggctacccatttgtccgccacatagccgccgtacagcaggatgccgttttcaggggccttgaaggcggccatttcccggtccgctttcagttcgttgtatttgtcctgaaggcggcgcagggacacctccgcctccgtcagggctatctttttctgttccaggtcaaaatcagcctgcttccgggcctgttccaaatccatctgcttttccttgaccgccgtggcgtagtcttcccccaggcggtggatgttgcgcagcttggccagctccgcgacgagcttggctccctggacggcaaattcgctttcccccagttcgtttttcaggcgtttcaggatgatttcttccgtttcctccgccacctggtcatccttgtacatcttggtaagctggttcagctcctcctgcttgtaggacatgtggcgcagggccttgttgacgcgttcctcttcttccgccagcatgcgggccttccgcttttccaggaagtctttctggtcctcctccgtccgggtcagggccgtctggtatttttgcagagccagcgcggagcgttccttctgctggtccagggcgtaccggagtttcagcacttccaggtttttgctcttgatggtgcgttcgtagtcttcaatgctcttgtccaggatgcggaagtccgcctgcgccacggattcccccttcttgacggagctgccctgcggcatgatgccgagcaggaaaatgtccgagctccccttgggggagaaggaaatggacttggtgtttttcttgggaagcaggatgcccggggcaatggaatccgccagggcgggaattccgatgagcagggcggccagaagtccggccgttgtaagagttgtgcggttcatggtggcaggatggaatcaggattgatgcgcggaaaaggggacgaagcgccccttctttccaagaataacggtgtgaaaagtggttttctttcctttatgtgaggcaggcacggcctccgtgctcacttcaaaacccgctttttggagtgtgcgggcaagccggacgtccggccgggccacggtgatgaccagcaggccgccctgcttgagcgcggcaaaatagtcggaagcctccgccacgctcaggttcatgcgttcatgcgtggaacggcacaggatggcgtggaagcttttcgggtttttgcgggcgatctggagcgccggagtgaattccacgctgacgcggggatcgtgcaggaagccggggcgttccccgtccatcagctcctggtgccagtcaacgagcggcttgcagggctccgctacgatgaagcgggccttttccctctggaccaggtccatcagggcaaacagggtgaaccccaggcttaggccgtccaggagaaaagcgggctggttggcccttttaaccggggctgccgccatggccgccgccgcttcattgctcccatgggaaaaactggacgcgagctgcacgccgtcacgaagaagaaaatggaagccgtcccgttcccagaggtcgagaatggaaccgtcgggcaaggtggtggaagctaatttggtaatgggtttcatatgaaataatgccggatacacagcgtaggaaagaacgcttttcagggcaagtccggacagcgtgtttaggatggaatacgctccaaattaaaaaaaattgcacggaatttgggctttgcgcattctttttcttgatttacggtcggaaataagcgagagctatcgttcagcacagctattttttccgatatgagtaatccacctcccccctccattccgggcggtactccgcctccgcccagcattccgactccaccggccgctccctccgtgcccaaggcaccggcggctccctctgtccctcccgcctccggcgctcctgcggctcccgccgcgccgcccgctgctgctgcgcccaccattccccttcgtcccgccgggctcggcggaggcatcaagcttggcggcgggttgaagacggttgctctcggctccgccacgacgcccgtggctcctcccgtcggtgcggcacccgcagccgctgcgcccaccgttcccctgacccctcccggggcaggcatggcgaccgcccagcttccgcaggccaccatcgggctgaataccgctcctgcggccgctccggtttcttccgcctcctttacggccaagaagtttgaagaagatacggaagcgtctcccaatacgctgctcaatattctttccttcgtggctcttgcctttgcgcttattttcgttggttatcaatacgccacggataccctggaagcccgcagcatgacgggctggctggggagcgactccaagcccgctgccgcggctcccacctccgccggtgaggaagcgaccgatgacgcggccgccgaatcttcttccgatgacgcctcctccgatgcccctgcagaagagtcttccgatgatggcgccgatgcagaagaataagtgaacataatgactgttgaaatactctaagcggtactatggcaaacgtattttctgaagcaaattttgaggatgaagtcctgaagtccgacattcctgtgcttgtcgacttctgggctacatggtgcggcccctgccgcatgatcgccccgatcattgaccagctttccacggaactggccggcaagatcaaggtgggcaaagtggatgtggacgccaacaacggccttgccgctacctatggcgtgcgtaccattcccacccttctggttatcaaggacggggaaatcatggatacgatggtgggagcctcttccaaggacgccatcatgcagcgtttgcgtccgttcatgtaaccggactggtttattcattcaagccggcctgctgcggaatgtaccgcggcaggccggtttttttgttcctggggcctgtctgaatgaatccggtgaagggaaggctaataacgggccgtccgccggggtaagattcattttttcttggcaggaccgccatggaagaatacattgtcagcatgggccccgagcagcgggaccgttcctctactcctttgccgttatgcgatttatctcttcattcctctctgtcttttccgcctgctgccttcttcccgccgcatggggcgctggcgacatggcgccggatttaaaatccggcgcgttctggaccctcccgcaaccggatttgtttgggaaatatttcaacggggaatccggaggctgggtggacagggacaagacccagctccggattgcgaagcctgcaatcaaaataggggaaatgtccctgggggaaatgctggtgcactggaaggaaggcgttccccagtccatgaccgtcatgatgtacaacaagggggacaacggggccattgacaaggatgagtttgaaaaacgcctggaccgcatcagggaagggctgaccgctctcaccggagtgcagcccagggagtaccgggccacccggaaggaggcggtggtcaaggtcaatggctggtcctggatttgggacaagggggcgattaccctggaaatcaatacgtcgcgggagggcagggaatttgaagcggaattcatccggttgaaggccggccccacggaggcttccatcgcgaggggcgacgcttcttcccgcgccagaaaggcggacatcaagcagcacgtcaggaaagaaggaaaacgggtggtcatccaggacattcccatggtagaccaggggcagaagggttattgcgtggtggcgaccgccgcccggatttttgcctattacggaatggattacgtggaccagcacgaacttgcttccctggccaattcctccgcggaaggaggaaccagcacggcggcaatggcggagaacctgaaaaagataggggcgcgcttccagatccggatcaaggtgctggattccctgacggacacccgtgatttccggaatctgctgaaagcctacaaccgcgccgcctccaaattaaaaaaggagaaggtggagaatgaatatgactggtccggcttctgggacaatgcggacggggaggtgctgaagctggcgcgcgccgggtctccgtcccagatggacaaatggctcaacgccatcaggccctacatcacggcgggcattcccgtgctgtggtccgttcaactgggcatcgttcctgagccgctgcgcctgtcccagacgcgcggtggccatttgaggctcatcatcggctttgacgaggaaaagaagacgctcatcttctcggattcctggggtgcggcccacacggaaaaggaaatgccgctggcggacgccatcgccattacgacggggcggcaggttatgcagccctccaaatagggccgtgctgcatgccctccttccgctgccggaagcgcctgaatattctctccggagaaaagtaattctgctggcatgggaaaggcgctgtattatacttgcgccatgatcagcagaacattggtgaaatatgctttgaacagtgaggcggaaatgccggacgtactgattcagggctgggtgcgtacgcgccgtgattccaaggctttttcctttctggaagtaaatgacggttcctccgtggcttccctccaggtggtggcggatgcaggcattcccggttatgaacggattggggaaatgaccacgggctccgccgtgagcgttcgcggggctctggttgccggacagggcaggcagcgatgggaactgcgcgctgcctccctggagctggtggggaccgctccggattcctaccctttgcagaaaaaggggcatacgccggaattcctgcgttccatcgcccatctgcgcccccgcaccaacctgttcggcgccgtgttccgcatgcgcagcaggctggcctatgccatccaccggtttttccaggagagggacttttcctgggtcagcacgcccattattaccgccagcgactgcgagggcgccggtgaaatgttccgtgtgacgacgctggacgtgggcgacgccgcctcccgtgacgcagccctggatttcttcggcaaggcggcctacctcaccgtgagcggacagcttgaaggggaggcgttcgcatgcgcactgagcaatatttataccttcggccccactttccgggcggagaactccaataccacgcgccatgcggcggaattctggatggtggagcctgaaatggccttctgcgacctgtacggagacatggacatggcggaagcgttcgtccgcttcctggtcggcgacgccctggagaacagcgcggaagaggtggaattcctgacccgctttgtggacaagggactgcgggaacgcctggagcatgtgaaggaaacgccgtttgtgcgctgttcctatacggaagccgtggatattctgctcaagagcgggaaaacgtttgattaccccgtttcctggggcatcaacctccagagcgagcacgaacgcttcctgacggaagagcatttcaaatgcccggtcatcgtttacaattatccgaaggagatcaagcctttctacatgcgtctgaacgaagacggcaggaccgttaccgccatggacgtgctggtgcccggcatcggggaaatcgtagggggaagccagcgtgaggaacggctggacattctggaggaaaacatgcgccgcatgggcatgaatgaggaagcctaccgctggtatgcggatctgcgccgctacggcacggttccgcacgccggattcggagccgggtttgaacgcctgctgatgttcgtgaccggagtgacgaacatacgcgacgtactgccctttgcccgcacgccgcgcaactgcgagttctgacctgcgcggagaagcttccgtttttccgttcggggcggcgttgcgcggccccggagcgggcgcgttggcgaatggggaaatgcttgtgaaaattgaccccgccggcaaaagaaaaccccggctttccctttggggagcaagccggggtaaaatcggtgctggggcggagactactgtctctttcttcttaacagcagggagcccagtcccagcaggctcagcgtggccgttgcgggttccggaacggtttcatagttgatcagtaccttggtgacgccgttttccgtgacctgcgtcacggtcgcctgtacctgggagttgctggcgatgttcaggccgctcaggtccagattgaggttgcctccctgctgggcggatttgatggaagccagttcaatcgttccgcttccggaaaggctgttcatatccagcgtgccggtgaaggtgacggtttttccgttggtccagaagttggtgaggtccgtagcggtccaggaaccgtgttccgccgccgtaaaggtgccgaaatccagcgtaaagtcacggcccagtccaaaggcgttgctggattcaaataccagatgggaattgccttccagggtaaaggaattgacgttgagatcccctatcgtagtcgtgcagaccagggtgcttccggaccctacctggaccgtattggtggcgccgaagaaggattgcgcggtggaccaggtaacggttccggcgttttccccgatgatggcgttgtcattggtgctgtgctgcgggaagtagccgttcggcgcgccgtccaccgtccagttgttggaatctccatagatcccgtttcctgccgctccgctccagacataggtggcagcctgggaaatcccggcggataggcagcataaaatgcagaatgtagataatctcatgctcaacagatactttaacagagacacggataacggatttccaatccggcgtcaatgcaaatgtttgaaggaggaacacatcaggcaaacatatctttactacaacttaaacggaaaagagggcacgagcatttaattaattcataattcatttattgtaaaatatttattttttaataaaccgggaatcggattggaaatccgtgcagacgtcattcctttattcggagatgccgtttttaaaagaaaagatttaatgtgcggcaggagacagtggttgaaacatacggaaaaccctttcccgcacagggcgggaaagggcctaccataaccaagtaaaagcatgcgctgaagcgccgtcctacttagaacgtatagctgatggctccgttgattccatgggaggtcagcttgttgcgggtctcgaactgatagcagacccgtgctccccaattgctggagaagagcacgtcaatgccggcattcaggcggaatgcggtgcgaccgacgttgacgccgcgcacgttccaggctcccaggggtccgctgacgttggacttgggattcatgcggctcacatcctgcgccgcggccaccgtcaaggccggggtgatggtggtgccgccgtccgtctggtaggcgcgggcgatggtcacgcccaacggaatggtccagttctgggcgcgggcgtggtcaaaggagcggccgtaaggtccgctttccgagaagcccttgagttcggtggtcatgaattcgatacccgtgtaaggcgttacaaaggccttgccgagtgcgaagtgttccgtccaggtggcgtacaggccgccgctgaaggagtccgcattttcattgccgttggcggcggttcccatgatgtaggaattgcccttgaacttggagcgtccgtaggcgccgtagccgtccagcgtgaacttgctttccctgaagggatgcatgcggccgtagatcatggccatgaaggaatccacgtcgtagtcggagccgaatccgctcttgtccttgatgtcgccgaagctctggcccactgcaatgccgatcagggaaccctgggcagccttgtagtcaatacccacggcatagccgcctgcattgtacttgtagccggagatgcctccgcgggcgtcctggtcatcccagttgcccatgccgcctacccagatgttgccgttgcccttggcgatcgtcttgcgggcgatcggggagcccttggcgtccaccacttcaatggtgtcttccgtctggcgggccatggaagcggcggactggatgcgtcccaggtcggcaaagctcctcagcgtccggctggcggcccacgcgaagttcatcacgttttcaccgctgacggactgaatcatgttggcagcttcgttcgggtccgtcacgcgcagcagggtttcatagaactgggcggcgggagaaccggcggccacgttcaggcggttgctttccagagcggccgctacggtgtaaacgttgccgttgtagccggacatgggaccgtcaatgcccctcatgttctgggtgatggtggtggtgccttccgtcgttcccggagccatggtggtggtcaggaacaggttgttcaggagacgtccggaaatgtccgtgccgttcagcgtgacgttcacgctttccgtgcccttcttcagctgggcgatcgggacgggattgccggtggcgtcggatacctggatgcccacgcgggaattatccgtgaaggtggccggggtgccgaagtcaagcacggagccgtcgctcaggagcagggtggaatcgccgccgaaggtggcggaagcccccttcatggtggaattctgcgccagggtcacctggcccgtccggatgtcgtaaaccgtatcgtccgtgcccattacggcggcgccgatggactggaggggaccgacttttccggtagcggcgtccacggttccaaaggtggcgtggccgatgatcaggttgccttcaagctgctggtaggtgcctccgaacgtgtcggtggctccgccgccgccgtagacgagggtgcccgtgccggtcttcgtcatgacggtctggtcagcggccagaggggcggcgtcagccgtgggggccgcgggagccgcggtgtcaatgccgtcattgatgaaggtgtaggcggtgccgtccgtataaacgttgatctgggtgttctggcccgcatgcacggaaccgaggacgccgttggacgtgttgtcggaaagaactgcgccggaaccgatgtacagggtctggccgtcggccaggttgatggcggccttgccggcgttggtggcggtgttgcccacgacctgggtgccgtctccgatggagatctggcctcccgcagtgatgatgccgtcagcggcggtattgccggtgatcacgctgttggtgccgatggcaatattgtcatccgccgtcagggtggaattccccttgacggtggtgttgttgcccagggtgacgctgccttcgatggtgtccagcttttccgtgcccacaaccgtattccagttgccgtcgtcattgctgtaaaccgtcttgttcaggtcgacggattccgcggaaacggtggtgccgttcagaacggtgttgtctcccagggaaacattgccgcctacagtcttgatggtgatggatccggccgtggtttcaccaaggacgatgccgccggaaatgctgtcatccatggaatcgatgacggttttgctgttctggttgttggccgcgtcaaactgttccgtggtcacggtgccgatcccggccgtggaggtcacgtctccgttcagcgtaactttggccgccggatcactgacgatctggccggtagccgtcacggtgtcctgcatggtgacgttgttgcccaggaccacggcctgctcgttggaattgctgtaggtgtcgtaggtcgtcctggtataggcctcacctgccgggggcgtggaggggtccaccgtgtgagccgcctggccggtaacggtgacggctttttccatggaaacgttgtcgccgatgcctacctgtccgttcgtggaagtgacggtggcgcctaccgtcttgggattggcggcgtcattcgttccttcgatggcaatgttcctgccgtcaatggtggtggtgtccgtggcgttcgtgactacgatgtcattgtcgcttcccaggggttcgctcagcgtgatgtcattgaagctgacctgtccattaaccagatcataattgaaattaaccagtttgccgctggggtccgccatttggacggtaacgttgcccgttccggagatggcattcaactgggcccgttgttcctgggtcagtgtgatgttatcggagcctgccggcacggtgatagtgatggttgacgcttcattcgaggcggcagcctggttccaggccgtcacgaatgaatcggcgctgttggccgcatagttagctgccgtagcaacggagaaactgccaaggcaagcgataactgctgccagcagcatatgtgggagtcttaatttcatgcttttttatttgtttaatgattaggtggttatgcgttcgtgacaatcacggcgcccgaggttttagatgattctcgttccgggctgttcagtgggatgacatgggaaggtttgatggagatgggaatgaaaatgattcaggataagatggttgcggctattgtctggcggtctttgtcatgacagggtttttaaacctggagccggaaaggaattccagaaagcttccagtaaattcattttcctgagaagaaaaaatatctcattgatggtgagggatgtatgatgttttctgggtcctcttttattttgctgtttccttcccggaataatggccgtgaaaatggttcaaacataaataagaaaatttgtttccggctgtggtggcagttgggatgctccgttccgcctctgcaagaatggagccttccgaacagggatgtgtccaaagctgtgcaatcaggcgaattttattgactgccaacggtcggcagcctattaccggggaatgactacccgattgtttacggtcctcgcggccgtgttgctgccgcttgccccggcgcaggaggccgatgtgccgcaccagccgcgcgtgtggaccaataccgccggcaaaaccatcacggcggcttttgtccgcttcaacgccgccggcaggaaagtttcccttaaattggagaaaggccgacaggtggaactgcctctggcaagcttgtccgggaacgacgtggactggatcaaggagcatgttccggaagccatgagcaaccaggagcgcatgcagcggcatacggaaggaaggctggggaagatcactaaaatccccgctacggattcctatccggaagcctttgtctattatccatccacgctgaaggcggaaactccgcctcccgtcatcattctgtttaattccgtaggcaatggacagcacatggtccagaaattccggaaggcctgcgaggccaacggatgggtggccctgggattgacgacgtttaaaaattcggagtccaaggaacatgaagccggactgggcaagctgtggacttccacgaacgggagtttggagagaatggccttttttgatgcggaccgcatgtacatgggcggcatttcaggcggagcgtcccgtgcctttacatatagtgagcgcaggattccgcccgtccgcccgtggaaggggattgtatccatgggcggctggctgggagggaaggaccgcctcacgtgccccacgcgcatggcggtggctattattaatggagacaaggacggaggggccaacagtgccgtcagccatgacgtcaaggttctcaaaagaaggcagtgcgccatcaaggaatttccctttccgggaaagcatgaaatgccgccggacgagaatttggtggaagtcctcaaatggatggaggaggtgactccccagacctccgcgcagcgtcttccctccccggcggaaaaggattaaagacccggtgcgccccgcatttaccgcaggaagggggacaggcttcctattctaccgcccactcctccaccaggctggccgggaattcatccagaaagcgggagggcatctgcatgaaggttcctccctgcgcgcggcagttccagcgggggtaggtcaggtaaagctggtccttggcgcgggtgatgcccacgtagaagaggcggcgttcctcctcaagacccaccaggtctccgtcgtcaatcacccgctggtgcgggaacatgccgtcgcacaggccgatcaggaaaacgacggaccattccagccccttggcctggtggatggtggacagggtgacggcgcctccggagaggtccgccgccgcgctttcatcatccgtattgcccagcagggaaagctgggagaggaaatcctccgtggattcaaagcgttcggagaatccggccaggtgcaggaggtcctgcctgcgctggtcgtaattctcaaaggcggcctgcatgtactcgtcatacacggcttcattgatggaaatgagcatggaggccggcccggcgatttttccggctggggccagttcatccagcgtgtagcagagctgcgtccaggccgttttggacttggccgggaccggaaaatccagcatcagggcggagaaggattccggcggcgtttccagccggctttccgggcatgccgcccagcgtatccagagcttctgggccatgccgggaccgatgccgggcagcagcatcaccatgcggcggaaggagagttcatccctgggattgaccacaaagcgcatgaacgccaccacgtccttgatatgggcctgttcaaaaaacctgatgccgctggtgatgcggaaggggatttccccgcgggtcagttccatctgcaattccatgctgtggaagtgtgcgcggtagagcacggctatttcattggggtccgtgccttcttcaatgaggtcccggatgcgctgggcgacaaatttggcctgcatcctgtcgtcgttgagcggaacgagggccgggggcatttccccggtaggccgcacggagcggagccttttttcaatctgcacctcgttggcggcgatggccgcgttggagagctccagaatttccggcacgctgcggtagttggtctctatcttgaaggtctttgccgccgggtagcgggtagtgaagctgaggatgttctccatgtccgccccgcgccaggaataaatgctctgggcgtcgtcccccactaccatgagctggccgtgttcccgggacagcaggtcgataaagcggctctggaggtagttggtgtcctggtattcgtccaccaggatgtgctggaagcgggagccgtacagggcgcgcagatgctcctgttcctggaaaagcctcacgacgttgagcagcaggtcgtcaaagtccatgctattggtttcctgcttgcgggccacgtactgttcatgcacgtccaggatggcgtccaggtggttggagaggtacggataggcgttttccagcgtttcctggatattggcgccctcattgtccgccaggctgaacagggaggaaaggacttccggtttggggaagcgggtggatttctcatccagtttgagggacttgaccacgcttttaatcatggacttgcggtcgtcggaatccatgatcgtgaaagccggagtatagcccaggtattccgcgtgctggcgcaggatgcggttggcaatggaatggaacgtgccgctccacaggcgggacaggtccaggggaatcagggagcgaacccgttccgtcatttcccgcgctgccttgttggtgaaagtgagcagcaggatattccacgggtccgtgccgtggtccaggagccacgccacgcggtaggtcagcgtgcgcgtttttcccgaaccggcccctgcaatgacgagcgccggccccggttccgaagaaacggctgcatactgttcttcattaagggccgtgcggtagtcgatcccggagatgggagcggctggcgcggcatcctgcttgatgacgtaacggcgggccatggcgtttcagttaatagttgatagagaatagttaatggaattggttgaaaaacttttctctccactctccactctaatcactctttaaaagtccaggtacatttccgcgcggcggttttccttgcgggcttcatcccgcgttccttcgtccgccgtgggggagtaagtgcggcgcggttgtgatttgccgaatcccttcgtgatgattctttccgcaggaacgccgaactggacgagctgggccttcacggccgccgcccggcgttcggagaggccctggttgtagcgttcactccccacatcgtccgtgtggccgctgatttccagcttcttgccgctatccatcttgatggcctccgccacaatctggagctggcgttcggaacgcttggacagagaatcttcattgaaaccgaagaacagggccagggaatcgcccccctgcggattcttcacgatggggatgaaaatgtcgtctccggccccctgccgtttcgtgtaggcttccagcatgttgtccagggaggcttccgcaatcagccattgttcgtccttcttggctacggtcaggcccacgttgccggctttcctgccctgggcgtcctgcaggtgaacgaaaaagcccgcattggtgggcgcttcataggcggttttgatgggagcgtcctcccggaggcggaaggcgccttcttcaaacaggatgcacagcccggccacggtggcgtcctgcaccttggttccgtccacgaatttccgtgccgtgcggaagtccgccttggcaacggcgtccatgaaggagctgacgatgcccatggggtcgttcatgaccatgggggcggccttgtccttggccaggtcctgcttgctgggcagcgtaagggtgtccagcgtccactgctgcttgtcattgcgcttcatgtccaggtagccgcgcgcgccgctgctgaagttgagcgtgtatctggccgtggggttggccccctggttattcgcgccgatgctggtgatgccgggggtggaaaggcgcacatggcgcgcttccatgagttcccggatgatgcggccctgggcctccgtgacggcctgctggatttccagggatttcagggtgtccgcgtcccggtcctgaataaccttggcaatcgcctgcgccagcgtctggggggagctgaggttgaccagggaggatggcgtggccgtctgccggctgatgtcttccttggtgagcgggtccacggtgggctggggcgtcaccgtctgacgcggaggaacttccgtttgcgccgcgggttcagcgggggcgggctcctcctcccggtttcccaggaacaggaagaccagggccaggctgcccacgaccaggaagctgatgatgaaggcggtgatggtggatgcgtttttcattggaggtgaatgtatgaaaaagggtcaggcgttcaaggcttccagcaatttggcgtgaatgccgtcaaaaccgccgttgctcattaccagaataacgtctcccggctgggctttcttgcagacggcggagacgatttcctgcgcctgtccgccgatcagggcgtccttgcccagcgcggagaggtcattggagagtttggtgagatccaggcgttcctccagggccaccttgtccggatggtccacggcggccaccacggggaaatccgccgtagcgagggataacgccagttcattctggaagatgtttctgcgcgtggtgttggagcgcggctcaaaaatggcccagatgcgtgatcccgggtagcgctggcgcaggcccaggatggcctgcttgatggccgtggggtggtgggcgaagtcgtccaccacggaaatgccgttgaccacgcccttgacttcctggcggcgggccacgccttcaaaacggctcatggaatccgccagctgcttgacgttcagccccgcaaattgtgcggcggcaatcgccatggcggcgttgcggatgttgaattccccgatcatcggcacgtagtagcgggttccttccagcgtgaaatggctgccgtccgtggaggtttccacgtccaggatgcgaatgttggaagagtcggaaaagcccagcgtcttgacggggcagggggcccccttcaccacgtccaggcagttgggatcgtccgcattgaccagcgccaggccgttgcggggaatgatctgggtcaggcggcggaagctcagcttgatttcttccagggaattgtaaatgtccgcgtggtcgaactcaatgttgttgatgaccaccagttccggcaggtaatgcaggaatttggagcgtttgtcgaaaaacgccgtgtcgtattcgtccccctccagcacggagaaatcggaatccgtaaaacggccgccgcggcccagattgcgggcgatgccgccgatcatgaagctggggttcagcccggagtcctccatcagccacgccagcatggacgtggtggtggttttgccgtgggtgccggtcaccacgtagttgcgcttgccgcgcaggaagtattccttcatcgtctccggcagggagaggtagcgcaggcgccgctggagcacggcttccacctcctcattgccgcggctcatggcgttgccgatgacgatgacgtccgcgtccgcggggatgttggaggccttgtagccttcaaacagggtgatgccctcctcctccaggaaggtggacatggggggataaacgttggcgtctgagccggtgacggtaaagccgcggcgggccatggcggcggctaccgcgcccatggcggttccgcagatgccgaggaaatggaaatggctgttcatgacggggggagaggaatggagcaggtttttatttggaaaaggtgggggccgcaatgcaggaatccgccagggcgcggtcacggcggcgcacgatgccgttggcgatgtccgtaaccatgccggacagcaggcgggtaaggtggctgccgggcgtgtagtccgccggggcgatgaagttcacgcggtcggaattggaagccaggttatagcacttgcggaagctgcggcccgtttcgtcctccggattgtacacggccacggcgtggccgccgttcctgcgcataacggtgaagcaaggcacgtccgtggggccgtcgccgatgtagatcatgttggcgaagggaatcgggcgcatgtcctccggcatgtggtcgttcacgtcctggtcgtaatccagcatgcccttgttgatgcggaaaaggtactgggtcttcgtggtgtgggaaatgaccctcttgggaaagttgatgtagccgttctcctcgctgaactcgcacccgaacacggccttgaaataggggcgcagggcagagccgtcaatcagggctttcaggccggaggaaatgatgtagtattcaatgttgatgcccaggtccgtatgaagggaggacagggtcatggacgggaaggcgtcaaagaaatccggcaggccggggtaaaaggtgaggcgttccccaagctgggtgagccgggcattgctgacgcggtccagggagagggcgtccagcaggcttttcatgtaaatcagttccccgtcccagccttcccgttccccggtggcgttgcacctggtccagaactcctgcggggagatgccgaattccggaaaaatggcctgatcctgcatgtagaaggggctcagggtctggtcatagtcgaacaccagggcgatcgtattctgcggagaggacatgggaggggcggaaagtggcgttacatgcggaactggtcgcccaggtactgcttgcgggcgatggggtcgttggcgatttcctcggaagtgccgtgcttgatgacctttccttcaaataggatgtaggcgcggtccacgatgtgcagggtttcccgcacgttatggtccgtaatcaggatggaaaggccgtccgtatcgcgcagctccatgacgatcttctggatgtctgaaacggcgatggggtccacgccgctgaacggttcgtccagcatcagcagtttggggctggtggcgagggcgcgggcgatggtcagccgcctcttttccccgccggaaagctggatggccatggagcggcgcagcttggtgatgccgaagcggtccatcagctccacggcgcggtccttctgctggcgggaggtcatgtccttgcgggtctggagaatggccaggaggttgtcctccacggaaagcttgcggaagatggactcctcctgcggcaggtagcccatgccgcgcctggcgcgcaggttcatcggcagttccgtgatattctcgcccgcaaaaatcacgcggccttcgtccgggcgcacgagccccgccaccatgtagaaggaggtggtttttcccgcgccgttcggccccagcaggcctacgatctcgccatggcccaccgtcaggctgacctggtccacgacggtccgcgttttataggttttgcagatgccttcggctctcagcagatgggtggataggggggagctcacggcttgcggttggttttctgtttgtcccggtcggaaagcttcttgtctacgtggcggaacgtggtcttggtgccgcggctgctgtacatattcccgttcgagtacacgcggatgaaggcgtccttgttcggattcttgatgatggcgtccggcgtaataatcaccggagagcctgtcaggatgatttctccggttttggcgttgtaggtgatcttgtccgcctgggcgttgctggtttccccctccttgttggtatagctggctttcacgttgccggaggccgcgaccgttttaatggagttatagtcaaaattgccgccgttggggagggccacctggggcttctccccttctttttccttttccttctctttttcctgcttgcgttcggagggcttcttgtcgcccggcttcttcggcacgaactccgcataaattttcaggtggtccgcacagtccatggaaagattggggttgcgcacccggacgtttttcatgaacaccagcacgccttcttccatgtcgaagtacaggtccccgtcacaatctacggagtacaggttgtttgaggaattggcgcgcatgaagttctcttccggattgggcgcagcgggagcggtgtccgcagccggggcggcggcattgccggtgacctggtgctgctggcggaattcctgaatctgtccgtcaacggtcttttccttcacgttgtacgcttcaatcgccttctcaccgtcttccttcaggcccgcggtcggaacgggggccagttcccgttccctccgggcggtttcctccgccgtcagggggcgcacgatgccggaggggggagccaggggcggttccaggcgtggatccagttccttgggcaaaggctgtacgatatgggcgggaacgccgtcagtggcgccgcaggcaagacccccggtcagggcgagcagcagcagggaggaaagttttttcataaaaggaatggttacttgttgcgttgatccatgcggatggtggtttgaacggggccgaggatgatgcccctcttgatattggtatccatgtaaaggccggtgcccctggcggaaaagttctcttccttgagggtggtctccgtatgggagacgaccagttttttgtccagaaagtaggaggcggccttcgtgaaaagatgggaggtctggttgttcttcccgtacaggtacacgttcaggatgctggcggcaatttcctgcggggcggctacggtcacgcttgaagcggtcagcagcatggaaaggcgcggcccttcataccgtgacaggctgactttggggagcacctggcctacgggcagaagctccagcatgggcaatttcttgtctacgccggcgaagggagtggctgcgggcagggtggtatccgcctgcgccgccatgccatgcatggcaattaccagaaagcatgtgaacggtaacttcatcatgactgaaccgcctgatggatggactgaaggcgtttcagcacgccttcaagcaggtggagggggatttggttgggcccgtcggaaagagccttggacggatccttgtgcacctccatgaacacgccgtcaatgctgccggtcgccatggcggcggacgccagcacgggagccagttcgctgtctcctcccgtggttccgcccaggcctccgggcctctggactgcgtgggtggcgtcaaacacgacggggaagccttcctgtttcatccagtacagggagcgcatgtccaccaccaggttattgtagccgaaggaggtgccgcgctcgcacatcatgaactcgtcacagccgaaggcgcgcatcttttccccgatgttcacagtatcccacggagccaggaactggcccttcttgatgttcacgggacggccgctcttggcgcaggcttccagaagatctgtctggcggcacagaaaggcgggaatctggagcaggtccacgtattcagcggcaatctccgcttcccgggccgtatgcacgtccgtaacgacgggcagttccagctctttgccgatttccgataggatgcggcagccttcccgtacgccgggtccgcggaaggacgtgatggaagttctgttcgccttgtcgtaggaggccttgaaaatcagcgggatgtccaggttttccgcaatggacttgatggagcgggccatctcccagacgaaggattcgcattccagagagcaggggcccaggaggtagaacggccgcgggccgccgatttcaacggattgaatgtaaaacgacataaaacaaaacctgtatgtccttatatcatgacggtttcaagccctccggtcaagccgctatcctgcctccgccgggagattcggcaagagggggccattttctccggaccctttctttagaaggttcataagaaaatgaaaatcagcggaataaaagaatttttcctgccgtattgcggagaataggcggccatggagggaaaaggcggttatggtattgccggaatccggcgtttctgttacaaacggcaggcatgcaccgtccctgcgtctgcaagtggggaagatgctgaacgccgccttccctccggggtctcacttcacatgcccaaaaaaatttacaagctatgcgtctcctatgatgaggcgggggccgaactccggcagcatctggcggatcgcatcaagctgctgggcatggacggcgctcccgtctggcaggcttccttccgggacatgcaggcggacgacctgcctccgggcgacggggtggttcagatttatccagtcttcatgcagagcggctggacggtgacggaagcgctgccggaacaattgagcgccatgtatgcggaacgcggcgtgtctccggaattcgaattcaagccggtgtggggagccggggaagacgtgatgcccctcctgaccgtccgcgacgccctcgggaaagagctggggccgggaacgtccctgctggtggtggcccatggagtggtgggaaaggaccttcctccggagccgttcgcctttttacagaaactgcgggcctttttatggccgcaggaaacggatatggccctggcctatttcggcgcttccccctccgtggaggaagtatttccacgtttgaagggaaacagggtggtagtgcttccgttcctgatcggggagggaaagcacatgagggaggacatgccttctccggaattggcggaaaagtggggcaaggaactggaaatattgcctcccctgggcgcgttttatttgcagaaggcgcgggaatactggggaagggaacgctccgggattttcgcgaagacccgtggttgacccctggggcgttccatgacggtttccctttcctccgggtgagataccggttccggtgcggggcgaatgccagccgcaatcacgcggcctgccgggcggctcccggctcttcctcacggcaggaaggaaagccctgcttcatggaccgcgccagctttctgctggtgaagtaataggcgatggcgagaggcacgcaggagccgatccaggcggcggggctcgccatgctggctccggtgaagcccaggcagcgggccagcacgatggcggccagggcgcgcatgcacaactccatgacgcccgcgaaggtgggcacgatgctctggcccagcccttgcagcgtgtagcggaagacaaagaggagcgccagcacccagtacatggaggcattgatgttcaggtaggtctgggccaggctgacgacttccttttccccgtctcccacgaacagccggatcagttccggcccccaggcaatattggcggcggctacggcgatgctgaaccccacggacatcaggttgcactggagaacgccccggcggatgcgctccagattcctggctccgtaattctgggccacgtacgtagccatcgtgatgccgaaggacatcatgggcagcgtcgccaccatgtcgattttctgggccgcgctgaaagccgctactgactgcgctcccagccggttgagggcaaactgcaccagaatggctccaatggcgatgatggatgcctggaaccccatgggaagggccacgcggatatgcgcccagaggtagcggcggctcatgttccagtccgccctggtcagccggagaatgggaaaccttttaaaaacgtaggcggtgcagcagaggcccgcaaccagttgggaggctacggtggcgacggcagcccccgcaggtcccatgccgaaccgcaggatcagcgccaggtccagcgcaatgttcagtacgcaggccagaaccaggaaatagaggggcgtccggctgtccccgagggcgcggagaacgttggagaggaggttgaacagcatggctgcgccgatgccccaggaaatgacgatgatgtaggcgtgggccgcctccaggatttccggaggagtttgcagcagttccagaacgggacgagcgaaggcgacgctgacggcggtcagcaggacggtcatgacggaactcaggacgatacagacggcaaagctgcgacgcaccgcccgcctgcggcccgctccaaagcgctgggccgtgatgatagccagccccgccgtgaatccgatgacgaagccgaggatgaaaaacatcaggccgcccgtgcagcccacggcggccagggcttccacgcccagcgtgcggcccacgatcagggtgtccgccatgttgtaaaactgctggaacaggttgccgatcagcaggggaatggtaaacaggaaaatcaatttggcgggattgccgcttgtcagggtcttggtcatccggaacgcccgcatggaacgcctcttccatgttttttccaagactgttttgcggcatgttcctgttttttgtacgataagtatcaggcagggggtgaaagccgctgcggaggcgttcctccggcgggatgccgcggatggcggaatgattgcgtaaatcaatgatttatgctttgacaagaagggcatcgtgaagtatattgtttgtccctcgcgtgattcggcgcaacctgaacaatggggatcggaggggtagaaagcgtcgaagtccccaaaaaccgcttttcctgccgcaaggaaagccacctacatacatatatgattaatgatctgattaaccagatggttgaagccggtgttcatttgggccaccagacccgcaaatggcaccccagcatgaagaagtaccttctcaaggacaaggccggtatccatatcatcaaccttgaagaaacggaaaaatgcctggacaaggcttgctccttcctggccgatctggcacgccgcaacaagaagatcctcttcgtcggctgcaagcgccaggcccaggaagccgtccgcgaagccgcggaagccactggtcagtactacgtcaaccatcgctggctgggcggcatgctcaccaacatgagcaccatccgcaagagcatcgaacgcctttcctaccttgaagggattgaaaagaccccggaattcaagagcatgtccaagaaggaactggccgctctggaccgcgaacgccagaagctggaacgcaaccttcagggcatccgcaacatgggcggcgctccggacgccatggtagccatcggcgccgatcatgaagacatcgccatccgcgaagcccaccgtctgaacattcccgtctgcgttctggttgacaccaacgccgacccgaaggaaatcgatttcccgattcccggcaacgacgacgccgtccgttccatccgtctggtccttgactgcattgtcaaggccatcaacgaaggcaagggcgctcccgccgaagcctaaaccaacccatttagaaagaacagaaacactatggcagaaattactgcagctctcgtcaaggccctccgtgacaaaacggacgccggcatgatggattgcaagaaagccctcaacgaatgcaacggcgacatggaagccgccgtgaagtatcttcgcgaaaagggcattgccaaggctgccgccaaggctgaccgtgacgccaaggaaggcgtgatccgcgccgccgtggctccctgcggctgctccggcatcatccttgaactcaactgtgaaacggacttctgcgccaagggcgacaagttccagggcctggtgaacgacgttgccaaggctctcatggattccaaggcctccacgctggaggaagccctccaggttgccatgcccgaaggcactacggaagaatacatcaaggccatgtgcagctccatcggtgaaaacatggctctgcgcaagttcgcccgcctcacggtggacggctccggtgctgtggtctcctacatccacatgggcggcaaggttggcgttctgctgtctattaaggccggcaaggaagaaaccgtcaagtctgacgcgttcaaggctcttgccaaggacctgaccctgcacatcgccgccgccgctcccaagagcgtcagctccgacagcctggaccccgccttcgtggctgaggaacaggaaatcgccaagcagcagctcatccaggaaggcaagcccgaacacctgctggaaaagattcttcccggcaagctgaaggctctgtacgcccagtcctgcctgctgaaccagggatttgttaaggatcccaacattacggtggacgccctgctcaagcaggtcggcaaggaactcggcgacgaaattaccgtcgtctccttcgtccgctaccagctcggcgcgtaagctccgcggcagcacccatctcaggagccgttcccttcgcggggaacggctcttttgcttgagatggatccattaaagatttattcataaaccatatgcatggagaaaccgggattccggatatgggtcatcaaaatgtgcggggaagaaaagatccggtcctgctgctgattattgcctctaccgtggtagctggtttctggagcgcttttgtgttgaggaatgtctttggtcttgtgtgggggccttggtatttccttgcggtgttgtggttcttcaaaaagaccaatagacggtggaaatgggaaacaacttcttttgttgttatcggcctcgtgtgttactatgaactcttttggtcccgggtgactccggaagatatgcgcgatgcccagtcggggctgattatcatttttggtccggttttttccggaatagcggctctccttggagatgccggggcagctcttctttccttccttgtccgttcatcctgcggcaaagatgagaaggagaagtaaagttgttttcggtagaagggcatctattggtacaggacgcggcggtagtaaaaacagactagatttttcctgcgtattcttcaggccggccccagtgttttttggggaaggcatgaatgggagatgcgcgtggatgtcttgatattggcggagctggcacggttggggtcttgttttgcctcaggaggcttgttagagtgatggtatggcttttctggaactggatcatgtgagcgttgtctttcctgcggtgcaggggctgctctcctcccgcaaaccggcgtctgtggtggcggtggacggggtgtccctgtccgtggagaaaggagaaatccttgggctggtaggggagtccggctgtggcaagtccactctgtcccgcacggtgatgctgctccagaagcctacggagggacgcatttttctggaaggagaggaactgacggctctttccgcctccgaggtcaggaagcgccgtccggattttcaaatgattttccaggacccctacgcttccctgaatccccgtttcacggtgtatgcgacgttgaaggaggcgttggaatgccgcagccgcaaaagatctttctcacagatgagggacgaggtggcggaactgatggaaagggtgggcctgaatccctccctgatgcgcaagtatccccatgaattttccggaggccagcgccagcgcgtagccatcgcgcgtgccttggctccggaaccccggctggtcattgcggatgaacccgtttctgcgctggacgtctccatccagtcccagattttgaaccttctcatcgctctggcccgcgacttgaatctgaccatgatcttcatttcccatgatttgtccgtggttcattacattgcggaccgtattgccgtgatgcgcaagggccgcatcgtggaatacggggaggcggacgaagttttttcctccccctcccacgagtacacccaggcgttgcttgccgcagtgccgcggctgtaggtgaatggaagaaaaaagaaggggggggagggattcctgtcaatgaatatgctcgttccatctatctcctttccaacgatcagcaaaagggaagtgctcagactgtcctgcatcaccaaatggcagataaagaaagttcggtgtagtcataaaatcctggtcagtaatttgagaattttacattactctcatttttattcgtcattaggtaataaggcatattcttttttaactagaatatcatgacaattaaaggttaaaatggttaagtggggattgggtcatatttccactactataatgatatgtccggtccagcgttattgttttggaaaaaacgggaatgttgcatgggttccaaaggtatgctgatgccaattatttttagaatggaatggaggattttattgtatttaggcctgtaataatggtcgccgtaaaattgttcaggatagatgatgcggtccgtaaattcgacatggaattctaaagttattttaatttcatatccgcatatttgactcatgtctgaaagtcgtttgttgatttcgttgatatttttgtctgtaaccagtatgtctgaccagtattctttaaatacaaataatacatgctggttgctgtttatatcaagagaatcattttcccaccattcaacgatacttatcagctgatgtagatcaagatctgaaatgccgtttcttttcatcagcctttttccatattttcgtgaataccattaaattctgaaaaatcacgtgatatttattgaaaatattctgaaaaggatcaatctgattttcataagaaatttttctattttaaaattaatcccataatgattggagatctataattccgaaaaatgattatttttagtgaaaatatctaaagaaacttccatggcgttttcaaaatttaatattttcttttgttcaattatatattccggatcttcttcaattattatttttgcgtactgtgctaagctatgtagaaaacaatgttgaaaataataacctccgtaaaatactctcgttttccccgaaggcattttaataaggataataccatttggtaatactttttgggtacttggtatacaaatactcgtataagaagatccatctaccgcgagagtttcaacttgtgtatatttgctctttattttttctaaagaagaaacatcgaaaaatcttttaagactctttgcactttctctattgtttaaaacatcaatataataatataataaaataaaagaaattaaaacaaatagaaggaatatgattttttttgcattcatttataaaagaaaataattctaattgaatagtttttgatatagatactgaaatccataaatagctccatatccaaatacaggcgtgccatataatacaatttcacaaggaaacatactctgtaatgatgtccgtagcgcgtcattttgtcccaaataacatgagcgtaactctacttcacatttttcacaaaagggaatttttacatttttgaatacatctgatatttgctgcctcgttcgagtttccatcagtccagcttctccccactcagcgcgtacattctgattagttccataggacatatctgtcccgtgcatcacaataagcaatttttttacacattttccacaacaacagtgttcactgggattaaaatcatctggagaaaatgtctcataaaccgggccttttctttctaatcgctttttgacttcttcaagtcctttatctttttctttttgctttccaggataagcaatataatttaatgttatttcgttgctctctattatagaaggttgtggaataggaacttcaacgattccagaggcacctccattgtaggggggtattgtacctaataaatccacttctatgttaattctattcctaataaatgcatacaaattccaccctccctgttcctggatgggatctctgttaatccacctgccgtctgcgggattgaggtggcggtaattgtagtagacaagtcccagttcgtcatccgagaactcgcaggaaaacctgaacttgttctcccgggtcatatctccttcagtggtaagtaagctaccgaagggagcatactcgtaacgagctcttctcgtctgttgtccgtcaaaaatggaagtgacgttcttcaaggcatcgtgcatgaagtagagatgctcttcctgctgtgaaatgttgtctttccagcatgtcatcatcaggacgcgcgtggctgtaggctccgtcggatcccacaaatagctcttcaccagcaagggttcgggatgcgtcaaatccagttgggctacctgcagataatcccggtacaggaaccgggagtggctggatactgccccattgatgaccactttcttctcaaagcgccgtccccggtagtcgtagccgcaggtgatagttgttctgccatcctggctggcgaagacgacggggcggtcgttggcgtcgtaggagacttcccagatgcctgttgaggtcctgatgcgggtctggttgccgtcggcgtcgtaaacggggttaaaatctcctcctcccccggcaatctccgtgtactggttgagccggttggattcgtaggagagggcttcctccagttcccgggctattttgcggttgccgatgttgtcatagcagtacgcaaagcttcctccccgactgatgcggtcttccagcagttcactgcggctgttataggtaaaatctcttactacttcagcagtagtgctgtcccagcaatcccgccgctggacgggctgcatcagcgcgtcgtagtcgtattcgtggccggccgccaattcgccgtccgctcccttcctgtaaccgatagcggttacgaggttgagcttgggatggtaagtattgctgcggaccatgccgttgggataggtgagctggttgaggaagccgctggttggatcgtactgccaagtaaagggagaagcgatgccttccagattcatcccaatcatgccacctttggaatcgtagtcaagatgggagtgctgcacggtgtgtgtgccgagcatcaggcggtatccgttggaacgcccctgggcatcgtattcttcttgaagagaactttccacctgtccaaaggaagtgtcctgaatcatcctgccgtagctgtcataggagagttcccttaatccggaggcgtcctggacgtaggtcatttgtccgaggtggttgtaggtgaacttccatccgggagtagcgtcattgtgggaggcggagacgagttctcctgtaaagggagcatacttatacgttgtgacaagccccctggctttgacaagtgtctcctgacggttgagctcgtcataggttttggaaacacaggaaccgtcggcataagtctttttcaattccagccccgtggcctcgtcatagagccagatggcggtgtctccgtcggttcggccggaaggatcggaagtgatgtcgccttcgtttgctcggaaggtagtcagggccaccatgcggtcggcttcgtcgtaggcgaagcaggccggctgaatggcggtgccatattcggccgtctttctgccgcggatgtcataggaataacaggttgttcctcccaaagcgtcggtgatgcaggcaggatggtcacagcaggacaggtaactggtgatggtgacgttgccggctgcatccgtggttttgactggtcgtccgtctaagtcagtttcaatcgtcgcgacattgtctctggcatcggtttgttttagaaccattcctgtggaggtataagaacgttcttgcgaggaatggaccccggcatgattcgtttggcttaccataaacccgtcgacgacaaggatctcggctgtgatatcggaagtgggaatgcgactgaaccgggtgcgtttggtaggagcggtatactccgtccactggatgctctgctgtccgtagacgtccgtggtgatggatttgttttccagtacagcgctgagtctggaaaccatattctccgtggtttgaatgagggggagaccgtcggcattataggtcgtggaggtctgtacctggtaaatgccgtcttcccggatccggtaacaggatgagatttccgatatcctgtttctggtagtatcttcgggatagagggtgtctaagagaacagttcgtctgacggcttgtcccagctcattgtagactgtgaccatgggagccatatcttccttttgggtactaataagttgtcccttgtcattgtaaacgcttctaatgacgatgaaccctcccttcgtattgggttgttcctgccggacgatttgaccaaagccatttttcagaatccgcgacagcacaactcccttggacaaggtcgtggtcaggatgccttcttctgtcagctccagccgggtctccatctctcgctggccggttcctccctccagaatgacagtgccgtcgtaataggttttggtaaccagagtggcccctgcaggagtggtaaccgtggtggtaaggccgtcttcgctgtattcagtccgagtcacgcgaccaagaacatccgtcgtggcaatcgttcttcccaaattgtcatactccgtgctttccatcgtcgtcatagctcccacatcccgtcgtgtggctatggttcttcccgccgcatcatagctgtaggaggtaatcatttcaggggtggtttctgtcgccgagcggatggtttccaccagctgcttggccgagttgtagccgtagccggtcacaataccgtcttcgtcggtttccctcaacggcccacagcacatccattccgtcgtactggttctgccgttgcccttcgtcgtcttgacgagcctctgttcgtcatcatattcatagtcctccgaggcaatcagcgaccagccttctccggtgtgaacgtattgttctttcctggtagtggcgccgttttcagcgatgtattgcacgtttcgtgtactttgtcccggaacgatgcttccgttggcctgcacggtctccgtcaccttgtggagggccccgtattccgcggtggcttcgtaagtataaacggtttgcaccccgtcaatactctggctcatcttccgcctgccccgggcgtagggatactccgctgcctccccataagtctcttccacgcgggtatgaacctggtcgcttcctagcgcggtttccatcacggtcgtgcggctggcctgcggactgtcttcataggtataagtgcgtttgagaagcgccgtttcttctccattctcggcaataattacttcggtttccgtagcgggcctgaagtcgttgaagcgcaggtcggcgtaagtcgtgcgtgtccccttttcaccgcctccggcccagggagcagcggaaagcacggttctgccctggtcatcgtactcgtagcgcgtgtacccgccgtcgggcttgatctccagggacacccggaactggtcgttgtaggtgtaaagcgtagtctgggccagagaggtcttgtacccctccgtccggctgatagtcagccagcccccgtcggtgtacttcttcaccgtgcgggtacaggaagaaggcgtttcctcgtcgatgccgcgcaagctctcaatcatttcccatttgcctccggggagggcatttttctccaccgtgtgcacggtgcgctcgtctccctctccctggatggtcgtcaccttgttgccctccgtccttcgctgcgttcggaagacaggcatcccttccctctgttcggcgatatccatcacctgcacgccctggtcggagctcagttcatagacggccgtcttgtagggagttccggtgccggcaaagccgcgcgcattcttgctcacctggccgggagcgtaccattccagagtgagcttgttgccttccccaaccgcctggagcagtccccgggacttggaccagatgctttgaatggctcccgtggagggatggcggttcaccttcatctgacgggaataatcttccgccgtggtttccacgccggaggcggagaccatggagacgacctttccggtggctgccgagaagcgcagggtgcgcccattgctctggaccatgtccagataggcgggagagccgctggtgcagggagacttgtcggcattcagcttccgaaccttgtagttcaacttgcgcgaacttccggagacggaggctccggaaccgccgtttgaactttggaaggagatggaactgcccgtgggtcgtttgacggagatctgtcctgttccgggattgcaggaggcgctccattcgaggggatgcttgtagcgtagggtgatggaagagagggcggaaggttcggcaagggtgcggggaacgggggaattatttcctcccccctcctgagtctccggttcctacttcaagcaatccttcgcagtcgtcggccccgtccggatagccgccgaagaaatgggaggtgttcttgctgcaatcggactgttcgatgtcttcgtcgcaatcacaggaacagggacatggacagcctccttcctccggctcgctggaggaagaagagagggaactggaactgctgctggaagatgagctggagctggaagaactcgatgaacttgacgaggaccaggaagaactgcttgacgaggaagagctggaagacggagcgctgctggaggaatccggctcctggggcggcaaggaactgctgtggaaactggaagacgaccagctgctcgaggaactggacgaggaagaactcgaactgctggaggacgacgaactggaagaagaaggcggcgcgctgctggaggaatccggaggctcgggagccgaagaactcggctggaaactggatgaagacgaagagctgctggaagaagaactgcttgacgaggaggagctggaactgctgctggacttggggtcaaactcaaacgaatctcctccccccgccgaactgctcgacgaatccccttcttccatctcctggtacaggttgaccagcgtcagcacggtttctccctccttgtcggcgggagtgttttccgccagcaggtaataatccaggtcgggttctccttccttgccgcatatcagggcaatgcagaactcctcttccgaccccaaggaaggctggtattgatggacaatgtggcaccaatagtatccctggtcgaactggatctggcggcagagaggggcggaagagcccggctccgtggagagttccagttccttggcgggaatggaaagggagatggaggagcgggcgtgaaggtggagaaaacaggtggcaggagccatgaccttgaggtatccgaaccattcgtgacgggtgggggaggaagcagcgcgtttgggaatgagaacgggagcggtgagaccgttgaccaggaagttgccctggggctgtccgttggggtacatgggaatgaaggggtagacggtgtccatggcgccgatgttgaaagtgttgttcatgatcttgaaattgaagttgccaaacaaacacagccagaatggggaacatttcctaccggtgaaatacgcctgttacgttatggaaaaaagatgaaaagcttcatggaacagttgtttcctttgatttatttctataattactgggtacagtcatataagggaaatcttccagagccgccgccccgagcttgattaataccagaccgcttctgattaatttccagaaatcttgaatagggtatagatggaatccgtgtttagagtgaacatgatttcaacttttgaggtattgttagattggacgaaaacggtgatggtttcttttgccgattttttgttgttaaaagtacactctagaattcgaataatatggatttgtagttatttcttgttactgagggcaggaagacaaagttttttattttcaactctcccatactttttcttatctcttttgaaatcatcatataaataaattcaataatttatatttaatttcatgaaagctcaaaggtggagaacctgcaaggagtgattggttcgattttacggaggttattggcagggtttatgtttaatctttgaaaattctgaaatgatggcacagttttatggaatgaaagtcgttgcgcgttgtctgactaaaaacagtccttcccgttttaaaaacatgcaaatatcattgttgaccttgctggtccttcttctccagactttttcggccatggcgcagcaaccggaggtgcagagcgccgccagggacgccgtggagtggcggcaccatatccatgagaatccggaattgtcttttgaagaatacaagacgagcaattatgtggcggacctgcttgcctcgttcggccacattgaagttctgcggcctacgaagacctccgtggtcggcattctgcgcggcggaaagcccgggaaaaccgtcggcttccgggcggacatggacgcgcttcccgtgcaggaggagacaggattttcctttgccagcaaaacaccgggcgtaagccatgcctgcgggcatgacatgcacacggccatgctgctgggaacggccaaggttcttgcctccatgcagaaggaattgcccggcacggtgtatttcattttccagcccggggaggaaaaatcgcccgggggcgcccttccgatcatcaagagtggagttctcaaaggcgtagacgccatcttcggtgcgcatgtgatgcccaatgaacctgccgggtccatcggcattctgccggcgggggccgcctcttcctcgtcggacggttttttcctcaccatccaggggaagggttcccatggctccatgccgcagctgggcgtggaccccatcgtcacgggctctgaaatcgtgatggcgctgcaaacggtcgtctcccgcaatgcgacgcccggggacatggccgtgatcaccgtgggaaaattccagtccggcaacgctcccaacgtcattccggacaaagcggtgctgggagcctccatccgttccgtaacgccggaaacccgcaaactgctggaagaacgcacccggtccgtcatcgaccatgtatgcaaggccaatggagcgcagtacaagctggattacgttctgggctatccgtccatccagaataacgctgccctgcgggaactggcgaagaaggcggccgttgaagccgtgggtgagaagaacgtttttgattctcccagaataccggctagtgaggatttctcctattatgcgcaggtagcgcccacttatttcatgaccatcggttccggggacggccctgcgaatcacaatcccggattcaaggcggacgacggagcgattctcaacggaatcaaggcggaggtccggattatcctggattacctgaactccaaataaaaggaggaaggcaacaagggaaaggcccctattcctgaccggagcagcgggcggcctcctgcatttcccggatgcattcctccattagcgcggcgtctatttcatggacgtcctttccccggcctatcccggtaagcatcaataccgtcaaatggccgccaaggtgctcacggaaggcttccaggcccttcagcacttcgcatgcgccatcctccgtcctgcgggagagcagagggtggaacacgggcagtcccagggctttcagtacggagacgattctttccgcctccgcagcaggcagccatcccttcctgacggaataaaggatgtccaggcacatgcccacggaaacggcttccgcatggcccagcgtgtagccggacatggtttccatgtaatgggcggcccagtgcccgaagtccagggggcggctggaacccagttcaaaggcgtctccacctccggcgatgtgagcggcgtgcagcagggcggaacgctccacggcatattccagcgcatcccgctcgcaggcggccagcgcggcggcgttcgtttccagccagtcaaagaaggaggcgtcttttaccacggccaccttcaccacttccgccaggccggcccttttaagggagaggggctgggaatgaaggaacaggaagtcattaagcgtggcccaggctacggcgaaggtgcccaggtagttcttctgccccatgaagttgattccgtttttgacgcccacgccggaatccgcctgggaaagggtggtggtaggcacgcgcagcagccggatgccgcgatgggcggcggtggcggcaaagcccgctacgtccagaaacgccccgcctcccacggcaatgatgtaggaatggcggtcgatgcccgcttccacaatgtggcggagggccttttcccacgcggcaaagccggttttggccgcttccccgcccggaacggaacggcagccggcataggccagttctccggcgtttttttcaaaataacggtcgatgtccgccgggagctgaggataaaaccgttccagtccttcctccatgaggacgaggacgcggcctccgtgcctctgctccatcaggctggccagcgcatcgttttccggacggaaggctccgtgggtaaagcccgttctatagggaaaatccagccggatattcagcgtatgaagggacatttcagaaggaatgcaatggaatggctcgcggctttcctaatccctgcggagcacgggaacagccctcatctggatgaagcggtccgccttggcggcctctttctgggacatgtacatggtgtacggctgctgggccacctcaatgcggtgcgtgccgccgggagcgggcaggtccagaagctggttgaggtgcttgaggctctttacctggacgccgttcactttttccacaatggaggagttcatctgggcatagcccagcgtggcctgggtgggcagcgccatcaggaagaccacgatttcatccacgccttttttccggatgtcttcctttttctgaatagcttccagcaggttgagaggggggcggttcttgctgagcttattgatttccctcatcagggctcccgtcaggggaacgaacaccagacctccgtaaatgcggtaggggggattggaaataaagggggccggattgatcagatccccctccagcgcgctccggtcaagcttgacatccagcgtcatgggctggctgacgccgtccttatccttgcggcggatgcccagcgtgatggtgtcccccggcatggcggagtcacggaacaggacgttggcagaaacggggcccagcgcggggtccctgatcaggcccttgctgtccagcggaatgccgttgacgctttccaccacgtctccgggacgcacgcctgccttgtaaaaggaaccgtagacaggcagtttcaccacgtaaaagccgccgccggtttccggaaggcccaggaacttgcggaaaacgggatccgtcagctccgtgacctgggtgccgtccgccgggaagccggtgtaattgccggaccgggcctgttggaggaaccgggaaatcatggtatgggtcacggccagcgccttctgggcggaaggatcgcagctggcgctgagagccaccagtttattatccctcatgatggggttgcccgcgccgcctttcagaggcgtgacggaggatttgacattgtacaggacaaaaggttcgctgttggtgaaagggctggagctttccgttgccagaagggttccggacgtagtgatggggaggccgtcgtcattgaactgccagaaggtcaccttgtcgcccaggcgcggggcgttccccagcgtgacgggcaccagcttgtccaggaaggcggcgtctgcctcgtttttcaggcgcagcagggcaagattggcttccgggtcaaaggcggtcacggtcacgggaaccgtttgggagccgtccgcggaggtcacttccacgaagctggcggaataaacgatgttggccgccgtcagaatattgccgtcccccaggtaaatgccgaagccctggctgtacgccgggttttccttgctccacggctggaccatggcatagccctggttggtggcgttaatgcctaccatggagttggtgggggaggggagctgcgccggagcgggcgtttcctccacctgttcaggcggtgtttccggctgctgcccgggctggggttcgggagcggttcgtccggcttcgcgcggctggcagccgccgagcagaatcagggaaccgagggcgaaaagggaaagaattttcatggcggttaacgggcggggttggtgttccggtcaggctggcggccgggaatggcgctgtccagacgggcgtttttcgggatgttgtaggttttggagatgcgcttgttggccgcctccatggccttgccttcaaagatcagggggcgttccccgtttttcagttcaataatcacgtattccggcatattcttcggataaaggagttcgtaggcgtgggtgaggcccttgaccttcacgccgttgattttttccacgatggcattggagatggagccggacaggcgcgcgttcacttcatcgtccagcaccttggtgatgattaccatgtcttcatggtccacgcagccgccgtcttcctggtaatcccggatatccagggcgacgtccagcatggagatgtctgccgccgcaagcacattgcgctggatgggctggaacaccaggccgccgaagacgatatagcggggcatcttgtcgtattccgccatcagcagatccttggagagagagggtttcatcaccatctccaccttcatgggcttgccgtcgcggatgatatccagcgggagccggtcatccttgaagcagcgttcaatgagctctttcatgctgattttctggccgtccagctcaatcatggcggagctgtccacgtcgtacccgtccaccttcatcagcaggtccccgttgcggagcactccatcggcggaggagcccttgagcactttgccgatcaggacgcccttctcgtcgtccggcaggccgaatgccttgcgcatggcgggattcagaatgggcgcggcctggatgcccatgtccacgtagccgtcatagacgccgtccttgatgtcctccagaaagtggcggatgacgggcgtgggaatcacgtagcccgtgttgttggcgttgttcaggccctggaaggctacgccgatgactttgtcccccatcagggcggggcccccgctgttgcccggattgatggcggcgtccacctggatggtcaggtgttccgtgttgcgggggtgggcatatgtggtgaagtcaatgcgggagactacgccgcgcgtgacggaaagcctgttgccgccgatggggtagccgatcaccctcacctcgtcttccaggtggggcaggttcttgctgaattcaaaaggccggatgcccttgaagggcttggggtcgtccgcttccagcagggccaggtccgcatcatgggcgatgaatttgaccctggcgggaattttgcgggaatccccgtacatggagatgtaaatgcgttccgcgttgctgaccacatgggcgttcgtcatgaaggcgttttccccgatcaggaagccggtgccgatgccgccctggtagcggcccgtatcccatggagtggcgtagtccggcgtcagggaatccacttcgatcttcacgactcccttgtactggtcattgacggaaacgacggggccggacatgaccttgtccaccccgaagtctgaaatggaaacggccggttcatccgcgtaggaaaaagcggcggcggccaggactgcacacagtccttggaggcaggtatggaagtgcatagtggtttgtagtgaagagataatgttctgaaagtaagttggttatagattgcttttccggctttgggttgccaggctttcctggaaggagttgacttcctccagcaaggaggaaaaacgttccgtcacctcgtcgtccacctggctgcggcggatgtccagcgcggctaccgtctggcgcgtctgttccacgcacagggccatgcgggcggccatggtacagtagtccgcatcgttgtccttctcttggagcaggcaggagagaatgcgcggggtgatgtagcggatgcagtaaaaaatctggttcaggggttccggcggttccgtccggttcctctgggatttgttgatctcccggctgaactggcgctggcacaggtccgtcagctccatgacctgctggaagagggggtggaacatgcaggactgcacttcctgggcctcctgttcgttgaggatgtcaaagaggctgagcatgccggtgcttttgcaggaacacggagtgcccgtttcctccgactgggcgatgttgtcaagcacgtcgtcccagcccatcacaaaggccaggcggatgtctccggtggggttcagcctgtatttctggaacacttcctggtaggcgatggcgatggcttccgcctcccgcaggcgcttgtcccagtggtggtcgggcaggttgccgtcttcctgggtattggcataggttttggaccattccttcacctgggtgcgcagcatctgctggttcgccatgatctgaacctgttcctcgcaggaatccatgatccattcggggagggagaccttgatggaaaaggccgtgctttccagcagcaccatgtcgtggtggctggtgaaccattccaggtacagggagttttccatggttttcttccccttgacgggcatgcggcggctggccgtcatgtcccccgccacgccccggatgttttccgggagctgggtaagttccgcagggagcatctggggggaggggttcctgaaatcgaccaggcatccggccaggtcctggaggcagtccccctgcagggtgatattcaccggatggggcatccccataagctgcagcgcaagcttgacggttccgcgttcacggttgtccagcgtgccgtagtggacgtagtctgtaattctgaaaatcatatggggaggtgggagatagagggggggtagggagaggtcaatgttgaatcagcaggaggctgttacctggggcagttccgcatttttcttttccacggcatccatgttgacaagcagttccgcaatggaatcccagcggccccggctcagggcttcacgggcttccgccggcatccggatggggaaggaaccttccttccaggaggctgtcaggttcaggaggtcgatcgtcacttccgtttccagatgatcggaaatgtaccgggtcagtgcggcaatgtcatccgcggacgcgcacacgcaagggaggccgatgccggtgctgttgccgaagaagatttccgcaaaggattccgcgatgacggctttgatgccggagcgtttgatggtttgcggagcgtgttcgcgggaggaaccgcagccgaagttggagccgcccaggatgatggaagcccccttgaagcggggatcgtccaccggatgggatttggactgtccgttttcgtcaaagcgttcgtcccagaacatgactcccgccagctcgtcaaacgtgatgcacttgaggaagcgggaggggatgatgcggtccgtgtccatgtccggtccgggaacgggaacgcaggtgccggtgatggaggtgaatttggtcagagacataaaggaaaaagttggaaagttaattcagggaaaacacgtcgcgcgcgtcggagaccttcccggtcagggcggcggcggccaccatggcggggctcatcagcagggtgcgcccggtggggcttccctggcgccccttgaaattccggttggaggaactggcgcagagctggtctccctggagcttgtccggattcatggccaggcacatggagcagcccgccaggcgccattcaaagccggcttcacggaaaatgtccgcgatgccttcctcttcacactgcctggcagtcatctgggagccgggaacggccagggcccggatgccgggagccacatggcgccccttgataagggcggctacttcccggaaatccgagatgcggccattagtgcaggagcctacgaagcacacctgcaccggcagtcccttgaggggcatgtccgcggggaatttcatgtattccagcgcctcattgatcatcttccgttcgtcgtcgttcctggcggaggaagggttgggcgtgctgccgctgatgcccgtgttctggtccggggaaatgccccatgtcagcgtcggttcaatggcggctccgtcaatctccacaatctcgtcgtactccgcgtccgcatcggaagcgaagctcaaccagcgttccacggccttgtcccagtccgcgccggtgggggcgaacagacggcccttgatgtattccaccgtggtctggtcggggttcacgtagccgcagcgggccgcgccttcaatggacatgttgcagagggtcatgcgttcgtccatgctcatggcgtctattacgttgccgccgtattcataggcgaagcccaggccgcctttggcgcccagaaggccgatgatgtgcagggccacgtccttggcgcgcacgccgggggccagtttcccgttcacgttgatgcggcgcaccttgagcgggctgagggccatggtctgcgtagccagcacgtcgcgcacctgcgtggtgccgatgcccatggcaatggagccgaacgcgccgtgcgtagccgtgtgggagtccccgcacacgatggtcatgcccggctgggtgatgccgagttccgggcctaccatgtgcacgatgccctggaggccggtggggaggtcgaaaaagcggatgccgttttccgcgcagttccggcgcagttccttgatcatggcgtcagccgtggcgtccgcgaacggttccgcctggttgtccgtggggatgatgtggtccacggtggcaaaagtgcgttccgggtgacgcacggttaggcccaggtcccggaccattccgaaagcctgcggagaggtgacttcatgcagcagatgtgtagcgatgaacatttgcgttcttccgtccggcaggatgccgacggaatgagcgtcccagattttttggaaaagtgttttccccataactggtataagcatccgtccgttcgggaaccgcgtcaagatgcaaggacgtattgctgacacggtctgtgtcttacaggaagtgtttttttgaacatttcccctgcattcatggtctgaaatggccgcttcccagcctttggcgcatttccgtcttcaagggaagaaggatttttcatgctccccggcacactctgcaccttctgaattccggtggaatttttccttccacagtgttgcaaaagcgtctccgaaccggtccagcaggtcgtccttctgcccggattccggcatttcctgttccaggcaggtcatctgcacgccctggatgccgcacggagtgattgcctggaaggggggcagggattcgcgggtcacgttgaaggcgaagccgtgcatggcgatccattttttcacccctacaccgatggaggctattttgcggtcctccacccatacgcccaccaaaccttcccggatgcgggcctgtacgccgaatttggcgcaagcttcaatcaaggcgttttccagggcggtgacgtagttgtgcaggtccctgccgcagcggttcaaatccgtgatggggtaccctacgagctggccggggccgtgataggtggcctgcccgccgcggttgatttcatgaacggggaaggggagcgcggaaccggggtgcaggctggcgtggtcgcgcgtgcgcccgatggtataaaccccggcatgttccagcagaagcaggtcgtcttcccgttccgggtcttcctgatgggcccggaccagttgttcctgaagttccagggtttcctgatagtctgccaggccgggaatgcggatgatgttcatgctgcggaggggcaacccccggtaagtgcggggcttaacgcgttctgcgcacctgctggcccagggcggtgcggtactggcgcacggcggcggccagggaggaggccatgaagttctggtagcgctccgtggagatgagcagggcttcctgcgggttggacatgaatccgccttccaccagaatggccgggtgcttgatggtgcacagcacggaatagcgggcgcgcttgatgccccggtcaaccatggagatgccttccttgatggcgagcggccctttcagcatgtgcccctgcacggctgtagccagggcgatgttcatgctgtcctgggagttgccctggagggcgtcctggcggatgttgcgggacatggaggaggaagtgcccgcaggagccagcgtgaaggtttccaccccgcgggcggaggggccgccgtcattgaagtggatgctgatgaagatggcgttgctgtgcctgttggcgatgcggacgcggtcctggagggtaatgaagttgtccgtgtcacgggtcatcaccacctggtagcccatgcccttgaggcggtcccgcagtttcttggcgacggagaggttgatgtccgcctccctgctgatgcggttgcgcgtgccgctgtcatggccgccgtggccggggtcaatgaccaccgtgttgaagctgcggcggttggcgatgtaagtggggcgcaggaccgggtcaatgattttgtgcaggtccatgttggagaccatcagccccttggacggatggtccgccacgggataggaaagcacgaacttcatgttgttcatgaacatgtcctggctgtgcgcctgcatgcgtatctggatcttttccggcacttcgtaaactttctgccgtccttccgtgcgttcccgtgtcagtttgtaatgggtgcgcacctcggacatcggaatgtactgcacgccgttgatggtttccgggttccatccgaaggccgtggacagcgtcagcagaaacatgcccaaaacgccgagcacggctgcaaatgatgtgcgagaggtcggatacataggacgatatcgcgtccagactaacggatttttcatgacgcacaagagaaaagtttccgtgaaagattcttttgcgcccgtctccggaaagagaaaaggcggctcccaaaagggggagccgccttgaatgagtgggaacagggaaggagccggattatttggccgccttctcgtccatcttggccttgaccagttcttcgatttccttgtacaggtcaggattggacttgagggcttccttcgcggcgtccctgccctgggcgatctggctgccgttatagctgatccaggagccgcgcttctggatgatgtcatactccatcgccaggtccagcaggcttcccacggaggagatgccttcattgtacatgatgtcgaactcgcattccgtgaaggggggcgccaccttgttcttgaccaccttgatcttggtgcggttcccggctacggagccgtcgctggccttgatctggccgatgcggcggatgtccacgcgcacggaagcgtagaatttcagggcgcgtccgccgggagtggtttccgggttgccgaacatgacgccgattttttcacggatctggttggtgaagacgcagacggtgcgggccttggagatgaagctggtgagcttgcggagggcggcggacatcaggcgcgcctgggcgcctaccgtggagtctcctatttcgccttccagctcctgcttggtgaccagcgcggccacggagtctaccacgatgacgtcaatggaattggaacgcaccagggcttcgcagatttgcagggcttcttccccggagctcggctgggagaccagcaggtcgtccaggttgacgcccaggcgggcggcgtactgcgggtccagggcgtgttccacgtcaatgaacgcggccaggcccccagctttctgggcctgggcgatggccgtcagggtcagggtggttttaccggaggattccggcccgtagatttccacgatgcggccgcgggcgaagccgcccacgcccagcgcgcggtcaatgagaagattgccggtggggatgacgtccacttccatcttgacgttgtctccaaggcgcatgatggcgttttctccgaagtctttctggatttgggagagggccaggtcaaggttgcgcttgcgggccgctgccagtttttccgcttcgggtgataaaggtgtttcgttgctcataatatcgtggaaagtatagcttgcgcggcgttattggcaagtgttcaataggtcttcgcggcctcatttcccgttgagaaagaatagaattctgacatgggggaaaacctgtgaaaaccgggtgtttcgctcgggaggaattgaggaaaatatggaagaacgttcccgggagaaggccgggaacggggaaaaaccgcttccgggaggggacgccggcacggcgtcattcctcaatcggttccgcaagggggatgtcctcgtaggaatcgtcgaaaatgacggggatattgtgctccggaatcaggttgatggcgctgattttccggtgcgtctggcgtgcgtgccggagagcgcgggacagtttttccacctggtgctccaggccgtaatggctgaaggtggcctggcagtcgttggagaagcgcacgcagaaggaccagtcgttgggcgtggtgatggagacgatgctgggcaggtattccgtcaccgtgccggagagcagctcaatcagcttcatgggcgcttccagctcccggatgccgactccgtagctgagctgggcggagctgggcggcctgagcgtgacggagggcatgtgcctgccctggatgtagggcaggtggacctgctccatacaggggaaaatgacgccctccttgtccgccagaacgccgtatttggcgtctcccgggtggacgcccagttccgggcagtcaatccatgccacggggatgcgcgcgtcaatatccaccagcagcgtgggattggaggatatctggcgcttgacggccgcccggcggatggccgggcatttttccagccgctgttccagttccgcggcatccatggaaaagatgttgtccttcgggcctatccccatgacggcgaaagcctgctcggagttgaaaatgccgttgcttttcagcgtgacggtgtcgatggagagccagtcgtacttgaggatgtaatccgtccagaggaagacgatggctccgataaggccgaagatgagcgtgtaaacggtgacgatgtggtacagcttgcgccggaagagccagaaacggtagttcctgcccttgcgctcaatggtttcttttctggcctcccgttccagcaggagcatttccggccttttggcggagcgggggactggcgttgtggctttgtgcgacatcggggggtgtgggatgggcgactccccgccctctgtcaaatattacgctatttccggggggtggctagcgataattccgctattttttcgcaaagggcctcgtaggaccagccggcggcagccgccgccttggggagcaggctggagggggtcatgccgggaatggtgttaatttccagcacgaagggggagtcgtctacctcgcgcagcagcacgtccacgcggccgtacacctccacgccggcggcgcggtaggccttcagggcggcctcctgcaccttggcggcggtttcttccggaaggtccgccgggcagatgtaatccgtgcctccgcccatgttcatccacgggtacttgttgctcaggtcatagaagccggagcgggggcagatgtggatgaccgggagggcttccccgtccagaacgcccaccgtaagttcacggccttgaatgaattcctccaccagcacggtggtgccgtgggtaacggcttcctccatggcggggagcacgtcttcctgcttgtggacgatgtggacgcccacgctggagccctcgcagggaggcttgatgacgaagggaaggggaagggacggcatcacgatgccgccggagcagtccaggatttccgcgcggggggtgggaaccccggcttccagaaataccttcttggattcggacttgtcaaagcacagggcgctggaacgggaaccggctcccgtatacggaacgccgcgttcctccagaatggcttgaagggccccgtcctcgccgaaggtgccgtgaatgatgttgtaggccagttccgtgccttccggcagccggaagtccggaccatgtacgtccacctccgttacgtcggtaaacccggcctggcgcagggcgccgtaaacggactttccggagacgagggatacttcccgttccgctccggggccgccaaggagaagggcaatcttgaggtcgcgcttgagagtgctcatattggaataaaataatgaatgggttaaaactggggttcccggtctccgatgacctgggcttccgatttcaggtcaatgccgcggttttccatggcttccttccggatcatgtcaatcaggatggtgatgtctcgcgccctggcatggccgcggttgatgatgaaattggcgtgcacgtctgacacgcaggcatcccccacgcaggcgtttttcaggcccagctcgtcaatgagcctgcccgccgggatttcctccgggttcttgaagatgcagcctgcgctggctcctacgggctgggtaagcttgcgcttggccctggccgccgccaggagccgttccatttcctccgccggggcgggctgcgcttcaaacacggcctgaagcacaaaattatgggccaggtccggaatggaacggtactgggcgttcagttcctcctttgtgtgactgcggatttccccgtcttcatccaggcagacgacggagacgaggtttttaatcatgtccatgcccatggccccggcgttcatgcggaggcttcctcccacattgccgggaatgccgtccatccattccaggccgcccaggccgttctggacggcggtggaaaccagctttttcagccgcactcccgcgccggcggaaaggcggttcccctgaatttccaggacgtcgaattcgcctccggaggggtggatgacggcgccgcgcaggccgccgtccctgacgatgatgttggagccgcggccaatgacgtgcacgggaatgttcctgtccctgcaataattgacggccgtctgcatgccggagaaggtggagggctccagccagtactgggcgcagcctcccaccctcatggtggtgtggcgtgacatgggttcgtacagcttgccttccagggattcgcccgcggtgcgttccagatcctccagcagagccaggtcgcgcgcgatgcgcatgccgcattcgtggacgtttccggcccccagcgtcaggaacaggtctccgggtttcagcgcgttgccgatggcgtggtgggccgtgcccaggtcgggaaggtaatgggtttccaccgggccgtgcctgtgcatggcgtcgatgatggtctggccgctcactccttcaatgggcagttcgctggcggggtaaacgtccgccacaaagacgaggtccgccgcctggagcaccttgccgaagtcgtccgccagcatctgggtgcgcgtgtagcggtgcggctggaagtaaaccaccaggcggttcggctggagggagcgggcggtctggagcgtggcggctatctccgtgggatggtggccgtaatcgtccacaatccggatggtgggggaaaggtatttggtctcaaagcggcgcttggccccggcgaaggaagccaggccgcgcgttatcgccgggaagtccacgcccagttccgttgccagcgcaatggccgccagggaattcagcacgttgtggcgtccgggaatgcccagctccacgcggcccagttcctcttcccctttcaggacggtgaacagggtgcggccgcggcgttccaggatgtccgtggcggtgtaatccgcaccagaccagccgtaggaaacggaattgggatagccggcgcatacgtccgctgctccggcatgggcgcggcagtaaatgatcatgccccgcgtctgggagcaaagctggtcaaacacggccttgatttcatccaggtccttgtaatggtccaggtgttccggctcaatgttgaggacgatgctgtgctccgggatgtagttcaccagcgtgccgtcgctctcgtccccttccgccaccaggtattcgctgtcctcgttccagtgggcgttggtgcccagcacggggatttccgcccctacatagtggcacgggcgcatgcggccttcccgcatcaggtgagcgcagagggccgaggtggtggttttgccgtgcgtgccggagaccacgacgcccttcttcccgttcaggatggccgccaggcattccgcgcggcgcatgcagggaatgttcagtttgcgcgcggcggaaagggccggattatcctcccggatggcgctggaataaatgacgatttccgcgtcggagacggcgtccgctgaatgcgggcaggaaaaagaaagtcccaggctctggagccgttcggtttccgtgctggtcacccggtcgcagccgctcacccggtgccccatttccatcagcatgagcgccaggccggacatgccggacccggccaccccgatgaggtggagacgtgccggatgttccctgtccatcaggcgtttgcgtaaagtctcaatcatggatggctgcatggtccgtgttttcaatgacattggcgatgcgggatactgcatcaggcgtatccagacgtaaagcacattcattcatggaggccagcagggaggaatccttgaagacttcattcagaaaagccgcaatatcgtccggcgtaagggtgttttcacgcatcatgcgcgccgcgccatgggccgcgaagacgcgcgcgttgtgcgcctggtggtcgtccgcggcgaaggggtagggaaccagcagggcggccttccccatgtgggccagctccgtcaggctggacgccccggagcgggaaatgaccacgtccgccgcggcgtacgcagtcgccatggcggaacagaattcaatgacgtgcacatggggcatgtccgccgtcagctggctgacgcgcgcgaagtcagcagagcccgtgatgatgagaaaatcgcacaagtccgcgcattgccgtgctgcttcaatgaccagtgaattcaggttcctggcgccctgggagccgcccatcaccagggccacgcggcggtcccggggcaggtggagctccgccctggattcattcctgtccttcctggccaccatttcctggcgcaccggggtgccggtgacaatgcatttggcggggttgaagtaatgcctggcttcctcaatgcccagcagcacgttcgtgcagcatttggcggtcatgcggttggcctttccgggcagggcgttggaatcgtgcacgtaggtgcggatgcccttgcggtgggcggcgtaaacgggggggaaggaagtaaagccgcccatgccgatgacgacgtccgcattcacctcgtccagaaggctgcggctgaaacggatggccttgtacagcctgagcccgaagcccagcagggacatggacgggattttgggcatcgcgatggcctcaatggtgcggaaattgagatcgccgtaattcttgctggcctgcgcatccaccttcttctgggaaatgaggagggtgacgttgtggccgcgctttttaagttcctgggctacggctatgccggggaaaaggtgcccccccgtgccgccgcaggcaatcacgatgttcagggtgggacgcgagggagagggttcagtcataatcttacgtcaatggagcgttcgtctttgcgggtgatttcacagttgggctgtgcaccggtggaaaatctctgaatgctggtgagcatgcccagggcggccagcgtgaagaccaggttggtgcccccgaagctgatgaagggcagcggcagcccggagttgggcacggcgttggtcaccacggcaatgttcaggatggcggggcagaagatgatggcgacgatccccacggccaggaaccggccgtaggcgtcccggcactgcatggctacgccgatgcccgcataggtcatcaggaaatagcagagcaggacgaacatggttccgtaaaagccgaactcctccccaagcggggcgaagatgaagtccgtatgggcgaagggaagcgtgccgtgcttttccgcgctgttgcccaggcccaccccgtccaggccgccgcgggacagggcgatggaggcgcggtactgttggagccccgcgcccaggcggtgggcgtccaggtccttccaggccaggaagcgttccaggcggttggcgttgctctgcaccagaacgtacagggccgctccggcgagcgctagggcgccgcccaggtaaatcttgcgcgtgccggccacgaacatcacgcagaacgcggccagggccagcgctacggaggtgcccatgtccttttcaaaaagaatcagcgccagcggaatgccgaagatgacgccgggcatcacgaacccccaccagaaggaggtagtgcggtcccggtacagggccagccagttggccagcgccatcatcatgcagagcttggcgcattcactgggctggaactgcatgccgatggtgatccagcggcgttccccgttgatctccttcccgatgcccggcacgtagcacagcaccagcaggaagcaggcgaaccccagaatccaccagatatacttcctccatatccggtaatctatccgggagaggatcatggcccccaccagccccgcgcaggcaaaggcggtctgcttgaacaggggctcgtacgggtgcttggtttcttccgcccaggccgccgtgctggataccatcaccaggcccacgaccagaaggcagatgacgaaaaaccagaccagaatcatgcagactttggaagacatggcggcaggggcgggaagagaaagaacttacttcttgggaatcatgatcttttgaccgatcttgaggcgtgctacgtcccggtcgttcatcttgttgaatttctggagggagcgccagttcatcttgtacttgcgggcgattacggagagggtttcacccttcttcacgatatgcgccacgccgtccggttccatttccgcggcggcggttttttccggcgccatcttgtcgccggggcgtgccggaatgacgagcgtgcttccgctgacaaggcgctgcaccctgggattgacggctttcaggtcattgacggccacctggttgtcacgggcgatccgttcccacgtatcccccgtgcgcacgatgtggcgcgcaggacctgccaccggagcggcgtccggaatgtgttcctgcacggcgggagccggctgcctgttcgggcgcgcgtccaccacctgttccggctgcgtgatggtgaccggagctgcgggagcggcctggggagcctggggcagaaccgccgggggagccgcaggaacgggcgtctgggaaacggtgggcggcgcgggaagggcggttgccatttccacggtctccgtcgtattcctgaaccaggtgctgcggacatagacgccgccgataacaagaagatggagaagaaggaggacgacgagccagcgcacgacggtgctgctgggagcgtcatcttcaaattcggagacgcgtgcgcggtatctgctgagcttggcacggagcacggtgcccattttgcgtttcggacgggtgcgtccggtcggattgtgatcgggggtcttggtcgttttcatgatggtgggtttctggtgggttgtcaggaaaggggggagagggcgttcaccgcgtcccggaaggcctggccgcgctggacgtagccggtgaacatgtcaaaggaggaggtgccgggggagaacaggacggtgtctcccgtcctggcgagggcgcgggccttggccacgcagtccgccacgtccgctgctttttccgtgggaaccacgggggaaaaggcattctgaagctggtccgcgatctggccgaagacgacgcacgcgcgcaccttttccttcagcatgggccgcaggggcacgtaatccagtcccttgtccttgcctccggcaatgagaaccacgggggagttctgggatttcagcgccgcttccagcgcgtgcaggttcgtggccttggaatcgttcagccacagcacgccgtccagcgtgcggacggtctcgcagcggtggccggggggcgtgaattccttcaatacttccgcggcggtttccgctggaatgcccaggtggcggcaggccaggagggcggccatgacgttttccgcgttgtggcgctggttcagggtggtatccgccaggttcagcaggggcttgtctccctccatgacctgtggttcccggtaataaaggtccgccgccggatcttccgaactgaaggtgcggacgggtgcgtccaggtgcggaagccgctctccggagcgtaccacggccaggtcgttttccgtctggttgtcgaagatgtgcagcttggcctggtaataatcctccacggacttgtagcggtccatgtggtccggcgcaaagttgagccatacggccacgtccgggtggaaatcgcggatggtttccagctggaaggaactgacctccagcgccagcacgtccggcacggaatcccggagcaggatttccgccatcgggacgccgtaattgccgcaggcgacggccgcctttccggcgcgaagcaagattttttccaccagggacgtggtggtggtttttccgttggtgccggtgatggcgatgatgcggccatggtagaagcggcaggccagctccatttcaccgatggtttccacgccttccctcccgaaggccctgacaaaggggctgtccgtctcaatgccgggggagatgaccaccaggtccgcgcggaaggcccgcccgtcttcctccgtggcggcggcgtgcagcggaatgtcttccggccagttgccgatggagggggaggcgtcaaacacgcgtacccgggcgccatgcttcatggcgaggcgcgccgcggcgcatccgcttcttcccgctcccaggacggcgatgttgaggttgttgagctgcatgttcgtggttgtcaggcggtggtgatcaggaaaaggcccaggaacgccagcaggaggctgatcatccagaagcgggcaatcacctgggtttccttccatcccttgagttcaaaatggtggtggatgggagccatggcgaagatgcgtttgccgtggcgcagcttgaagctgcctacctggagaacgacggatgtggcctccatgacgaaaacgccaccgatgacgatgaaaagaagctcctgcgccgtgcagacggcggccatgccgaatgctccgcccagggccagggagccggtatcccccatgaagaccctggccgggtagcagttgtgccacaggaaacccaggcaggcgcccaccagggccatcatgaaaacgctgatttcccctgcgccggggtggaaggggatgtccagggaatccgccatcagccagttcccgcaaatggcggcaatgatggcgtaggagatgcccgtggtgacggagcagccggaggcgaggccgtccagtccgtccgtcaggttcaccgcattagaggcggacatgaccaccacgacgccgaagggaatgtaaacgtaccacggcaggttcacttggccgtagaacggaatgaacagggaggagacgtagtcatgcagttccacgcgggggctgccttccgggtacaggtacaggaacatgacgcccgccagcccggccaggaactggatgaagagttttttacgcgcggaaatgccgtccgaggttttcttggccaccttcaggtagtcgtcccggaagcccagcagtcccagcgccagggtgacgaacaggcaggagatgatgaagggattgttcattctggcgcacagcagggtagccgccgtcatggagcctacgatcagcacgccgcccatggttggagttcccgccttggctccgtggagttccgccagcttgtgcacttcctccgcggtcctgatgggctggccgattttcagggaaatcagcgcgcggattacccgcggggcgaacatcatcgtcaggacaaaggagatgaggcaggccagcagggctctccctgccggttctgcaagcgcccccgcggggctgagctgttcaatgaaggaatgcataaaatttactggggcggaaaggtgaggttcatgacttgctccatccgggcaaggcggctgcccttgaaaaggacgatgtctcccggcgccgtgtggctgcggagccattcggcggcttcctctgcggagccgaagttcagtcctttggtggatgagttcggagaaatggcgtccgtaatccgggcggcatccgttcccacgctgaccacgcagtcaaagcggagcttttccgccgtgcgtcccaccagcgcgtgcccttcttcggaaaacgttcccagttcccccattctgcccagcaccgcaaagcgcctgccggtgcaggaaagctccgctgcggtgtgcagggcggcctgcatggaatccggattggcgttatacgtatcgtccactaccagaatgccgttggaccgggtgcagtggagcctgccgcccgtgagctgagcccggttgaggccggagacgatctgctccttcgcaagacctgccacccagccggcggcggcggccagaagcgcattggccaccatgtggcggccgtggacgggcagttccaccacctcccggcagaaatcaggaatggaaagggtgaaacgcgtcccattctccgtggagaccgggttttccgcgcggacggttccggagtcaatgccgcactcaatgcacgcggcgcgggtggaccggcggatcatctccgcataatcgcagtccgccgggaaaatcataaagccgtcttccggcaggcagcgggctaccgtgcatttttcccgggcaatgttttcccgggagcccaggtattcaatatgggaggtgccgatgctggtgatgatgccgatcttcggacgcgtcatttcacacaggggggccagttctcccggatggttcatgcccatttcccacacggcggcctcgtccgccggggaagcccggaggatgctgaggggaacgccgatgtggttgttcaggtttccctgcgtggcgatggtccggagtccctgggaaagaacggaggcggtcaggtccttggtggaggtcttcccgttggagccggtcaggccaatggcggtgagggtcagaccggcacgccaccaggaggccagctgctggagggctttcagcgtatcctccaccaggatgacggcgcaggaggggtccatcccttcctccacgcggctgacgacgactgccgccgcggtgcgggatgcctccggggcaaacaggttgccgtcaaacttttctcctcccagcgcgaagaaaacggcatggggcggcagggcgcggctgtctgtgcacacgcctccggaagcgaccctgtcaaaggggccgctgaccagttttccgccgatggcgttgcagatgccgtgtgccgtgagggaggtcatgaaagatgaaatgatgtgttatgcctgcgggaactcttccctctccttgatgaacatgttgcgccgcacttccttggcgtcgctgaaatcgatgcgtccggtggaaagctcctggtaattttcatggcccttgcccgcaatcaggacgacgtcccccagccgggcctgttcgatggccgtggcgatggctcgggcgcggtccggaatgatggcgtacctgccttccggcatgcccgccgtaatctggctgatgatggagaggggctcctcgctcctggggttgtcggaagtgacgatgcaggcgtcagacaggcgcgcggccacggcgcccatcagcgggcgcttgcccttgtcccggtcaccgccgcagccgaacacggtaatcaggcggcgggagcagatttccttgagcgtcctgcagacgttttccagggcgtccggcgtgtgggcgtaatcaatgaagatctgggcgcctccggggtgggtgaacaattgcagtctgccgggaacctgcggaatgttctggaggttcgcgatggcgtcccgtaccgggatgccggcgcaaatgacggccgccagcgcggccaggctgttgtacatattgaatttgccgatcaggggcacgcgcaccaggtagctttttcccttgtattccagttcgtattcgctgcccttggccgtggcgtggtgcaccagcatgcggaaatccgcgcccagggcggaaccgtaggtcttgacggccatgcggccggagaacatttccgccaggcggcggccgtaggcgtcgtcaatgttgatgacggccacgggcttgcggcgggccctggtgtcctgagccatctgctcgaacaacttcgccttggcctggaaataattctccatggtgtggtggtaatccaggtggtcctgggtcaggttggtgaaaatgcccacgttaaaattaatgccggccacgcgttcctggtccagcgcatgggaggatacctccatggaaacgccgcggcagccgttttcaaacatctccttcagcaggtgttccagctccagcgggccgggcgtggtgtgggtggagggggtgatttcctccccgttgtcataggcgatggtgccgatcagcccggcgcgcagccaggactgcttcagcagggaatgggcgatgtaggccgtcgtagtttttccgttcgtccccgtcacgcctatcatggtcatgtggcgggagggatggccgttccaggccgcgcccatcaggctgacggccaggcgggaatcgttcacctccacccagctgactccggcgtccctggcttccttcgtgcagggcatttccgcgacgacggcgcaggctccgcggcggatggcttccggaatgaactcgtggccgtccgcctgggttcccttcagggcaatatagcaggagccgggcagaacgcggcggctgtcgcattccagatgggagattttcacctggggggagccggtgagcgtatgggcgggaaggtctttgagcaaggtaagtagcttcatgattggtttatctgcgcggcggtttggacggggaggaagaggcttgggcgcgggaggcttttttgtccgcctccgcggaaggggtattcttgggaatgttcatggccgccgccaggcgggtggccagtttctggaagaccggagcgcatacggtgccgccgccggggtggcagtgcttggaggtgggatcgtcaatgacgatgaggcagacgaaggccgggtcctccaccggaagcatccctacaaaggagacggtatagcggttgtcaaaatagccgcctgtgggcttcaccttgtgggcggtgccggtcttgccccccacgttgtagccttcaatccgcgcccttttggcggttccgtccaggtccgtgacgtggaacagggcgttccggaggttccgggctgttttaacgctcatgacccggcatacttccacggggggggatggctggaaattcttgtcgtccacgtaaatgccgtccaccagccgggggcgcatgcgcacgccgtcattcgcgatggcggcgtaggccatggcgacctgcaagggggagaccatcagggaatagccgaagctgatgcgggagaagttgacgaagttgctgccgtcctggcactggctgttggtttcccccggcaggtcgatgcccgtcttggaggaaaagccgtacaggtcaaaatactttttatacgtgggccagcccgatttcagcgcaatgcggaaggcgcccgggttgctggactttttcagcacgcccgccacggtcaggccgctgtagaaacggggggcgtccgtgacggggcgggagccgggcaccatgtagggcgtgcagttgatcatggtatcgaatgtggcctttccgctgtccacggcggacgtgacggaaacgatcttgaaggtggaacccggttcgtacagggactgcacggcgaagtggtaggcgccttcctgcaggccctcgcgcgtatttaaattatagtggggacggctggccatcgccagaatgctgccggtcttgggctccacgacgataatgcagccgcggggcttgtgggtctggtccgtgtaaaaggaaatggcggcgtccaattcctcctccacgatcgtctggtactccatgttcacggtcaggcgaacgttcaggccgtccacggcgtccttgaaacgggaatccgcggaggggatgatgcggccccggctgtccttccggtactccctgatgccgttgtggcccagaagctggtcgtccagctgcttttcaaggccggaaagggccacggggcgcggaccgctgtccttcgtctgggcgatgtagcccagaatgtgcaccatgcattccggcacggaataaacgcgcttggaagaagtctcaaaccggaacccctggacgcgggcgttctggatggcctggcgcagcagttccgctttttcctcggacaggttcttggcgatgacgatgcgcttcttgggaatctccccgtccttttccaccgtgttgatgatgtcctgcacgctcatgtccggcaggaagggggcgatcacgctggcggcgtattccagatgggcctgcacgtattttctcaccatctccggctcataaagctcttccagcttcttcctggccatgtctaccccttccgggccgtcctcaggctcttccagcaggattttcgccagattgtgctccttgctgccgtccttcttgctggccgcctgtcccaggattttgctgcggaaaccggaaacgagcttctctttctccttgtccgtggcggcttctccccagaaggcggagtggacggccttggaataggcaagcgcccagctgatggtcttgggatcgttcaggtggtagccgtccgcaatcagctcggaactctgcatgttgttggtgaggatctcctcattggcgtccatgatgcggccgcgctggggcaggagaacctcccgttcaataatgccgccgctggggactccgcccgttttccggggggaaaccagttggaggttgaccagcgtcagcatcagccagatgaccgcagcgcccgccacgccgcacaggacgaggcttcttctggcaaatctggacttcgtgatcgtggtcatgaacggctcggcgcatttaattgcctgccgcggcaatgcgggaggcgttttcggaagaaatgtattctacggctgagggctcgataggctgaaggttggacttgtcctgggccagcctgtcgcggatggcccagcggctggtcagggaggaagtcttggaacggtaatattccttcgtgagttcgcaggaagcgatctcctcgttcatttgcttgatgtcgcgcgcgacctggatctggtcgtttttcagcacggcataagtgatgcccgccccgcaggtgagggaggcgaaggcaatgagccacatgatcatgctcacgctgatctggtggccggtgaaacgctgtttgaatcttttcatggcggtggcgaaggagagatgggtcagatgattttttccacgccgcgcaacttggcgctgcgggaacgggggttggttgaaagttcttcttctcccgcagtgacgggcttgcgggaaagcaggcggaagcagtaatccgggttggggcgcggagccggccattccggacggtcgatttccggacggctccggaggtcgaagaactgcttgaccctgcggtcttccaggctgtggaaggtaataacggccatgcggccccccttgcccagcaggcgcacggaggaatccagcagcgcgtccagcgcgtccagctccccgttgacggcgattctcaaagcctggaacgtacgggtgccgggatgctgccgccccttgcgcggaaggacggattccaccacgcgggcgagctgggcagtggtggtgatgggagccagggaacgcgcctttacgatggcgcgggcaatggcgcgggaagcccgttcctctccgaactgccagaggatgtccgcgatctcttcttccggggcctcgttcaccaggttgcgggcggaaaaggcggcgcgggtgtccatgcgcatgtccagcgggccgtcttcccggaaggaaaagccgcgggaggcggtatcaagctggtgggaggaaacgccgaggtccgccagcaggccgtccacctgggaaacgccctgctgggcgaggatgctttccacatcctggaaattgccggcgagcaccttgaaacgggaaccgaaacgggccagtttcagcgtggcggcgcggcgggcgtccggatcgcggtcaatgccccagacggtagcgccctgttccagaagaaattccgtatggccgccgccgccgagcgtacagtccacgatcagtttgtcggggcctgccgccagcatgtccaccgtctcatgcagcagaaccgtaacatggttgaaaccgttgccggaaacggctccgtccgtttccgcgtcagcggaggcggaaacggcgtcatcccccagttcggaaaccagggcgtccactttggctccggcttccggagctttcagggcttccgtgtggtacacgccttcccagttcatggagggggcaagcgccttccaggaacagaccagctcgtccacccccttctcctccgtcaactccgcaatcacgtgcacatggttgcggcagatgctccatgccagcacgcggcaggacgtttccgccgcaagggcatttgccagggcctgcgcctcctccgtgcggacatgcgtacccgcgcccgcgcgtaaagaaagctcaacatggccgtcaaaagcccggttcaggctggaggacaatgcgcccaatttgccataagcgcccttctgtcccgccagggacatttccgcggtgatgcgcgccttctcctgctgccaggcgatcatgtcctgcgccggaagggcgtcgtgcccccagaaaacaatggaataagccgtaacctccgcattcagcccggttctggcgccgacgcccaggccggaaacaagccagcccgggcgcagcgcaagcgttgcgtagggatgggcctgatgcgtgggcggaatggtagggtctgggggcatgaagggagatcagagaatgccgtaggattggttgatatcggaaatattggcgttttcacgccgggagacttcttcatagagagaaggttcccataattcgaaatatcctctccgcgcggcgagccggacggaggaactgagctgtgcgtgttcgcacatttgtttgggtatcagtagtttgccctgggcgttgatgatggcctccacgcagttggcatataatctgccgatgaacaggtcgatctgcgcttccgtgtagccgggcgtggcttctatcttgtcaatgagttgctggaatttttcccgcgtataggctttaacggtcggcaattcaaggcgccggccggatagcaggagcagggcgcaaccttcggtaggcctccattcagccggaatcgcaatccggtttttggggtccagcttgtgcgtgtatgcaccaaaaaggttgtctgatacactgctcatcgcatgcaagtacactacgtagtgacttcaatacactttaatgcacctgaaatgtcaaccccgtactggaaaaaagtattttttcttgtgttcatgtcgtgaaaaaaagcattgatccgctcttgcgccgctccgggaccggtattatattccgcgcatgatgcagttttgcgtgttgggcagcggcagcggaggaaatgccaccatcgtcaaggcgggggaaaccgtcctgctggtggatgccgggttcagcgccgccaggctgcgggataaaatgaaatccgccggcgtggaaccggaggagctggacgccattctgctcacccatgaacacacggaccacatgaagggcgtgcatcagttcaccaggaaatacaccgtgcgcgtctatgccacccgccatacggccatgtgcgttcaggaaaaggcgccggaagccccctgggcctactttgaaaaagggcagtcctttaaaataggggatatcgtcatcaccccctttgccacctaccatgacgccgtggacccggtgggattcaagtttgaaacggaacggtccagcctgggcttcatttccgatacggggcaggcccccggctgcgtggcggaacacctctccatggtggacagcctggtggtggaatcaaactatgatccggacatgctggcggccacccccaagcggccttggccgttgaagcagcgcatcgcctctacgcacgggcacctttccaatgaacaggcctgcgacctgctgaggcgcatcgcccatgacgccctgaaaaacgtagtgctggcccacctgagcgcagaaagcaattctccggaattggcagaaagcctgatgcgtgctaccctgcatgacatgggactggcttccacctccctgttctgcgccagccaggactcctgcctgccgtggatacgggtctgctgaatccgcctctttccttcctcctgccgccatgttcctctccatctgtgaaatcatgagcacgatcattggagccctggcgggatccattgcttcttcgcgcgtgaaaatggacctgttcggcgtgattgtctgcggcaccctggcggccctgggcggagggaccgtgcgcgaccttctgctggacattccggtgtactggacgctgccctccggggaaatctttgtcctggccgccgtcgtcaccagcctgggaaccttttacgtggcccagaaatacccgccgcccatgggcaccatccgcgtggcggacgccatcgttctggccctcttcggcatgatcggcacggaaaaatcctacctccacggctatacgcccaccgtttccgtgatgatgggcatctgcaccggcgtggcgggcggcctgctgcgcgacgtgctcaccggaaacgttccctacgtgttccgtcccggggaactgtacgccaccgcggccctcctgggaggcgtggcgtacgcggtgctttactacttcgggatcgactcctccacctgcttcgtgacgggcttcgtggtcacgctctccgtgcgcctggcggccatccgctggaactggaacctgccttcctacattcccctgttctccccggaggcagaaccggaagccatggaggaagaggaaaaggagattctttccgggaaacccggcggacggtaatccgcgctacttgtggaagcacccttccatgcaatagacggaaagcttctccaccgtaccgtcccgctcgcagcaggagcgcatgttgcagtgcgggcacagttcccgcacatttgctacgtccagggttccccgtttttcgtgaagggaataaaggtacttcaggtatttcccctccgcgatgcggtggtgggtgtccttttccttcagccccttccattcgtacaggcgtttcccgcccttggaggaattgcaggacttgcataccctgacaacgttatccatgatatcttctcccccgcagtcgcggggcaggatatgctccgtggtcaaattctttttttcgccgcaataaatgcattctccgggatgttccatttccctgacccattcgcgaacggaggaagaccaatgtatggtccctgcgcaaagctccttccacttgctcataatcatgccgtaattggcctttccgaagccggaagaagaggcaatgattttggcatattggtaataaatgatctggcggacggatttgacggcgggaggaggcatgatgaggatataaaagctacttgttgaatgatgctgtccggattttccggagctttacttgcccaggcagaaggaggaaaaaatggcgcccagcacgtcctccgtatccacggctccggtgatttcccccagatgcgtcagggcttccctcagttccagagccgtgaattccgggctctcctgccgggagatggattcagaagccagccggacatgctccaggcacaggctcagttcatgctggtgccgggcgttgatggctaccagggagctgcccgtttcaccgggcagggaagaggcaaaggcctggataatggcttcttccaattcctttctgccttctccggtggcgcaggaaaaacggatgccgggaacggccttccagtccgggtggattcccagatcgcacttgttcagaatcagcagccggggcgcggtacgggcggccgtggggaaagcctctgtccggggcgcggaggcgtccgccacttccagaaccaggtccgcggattccagcgccctgttggtgcgggtgatgccggcctgttcaatcacatcggaagattcccggacgcctgccgtgtcaatcagccgcagggccagcccggcgagctggatggattcctccactgtgtcccgggtggttccggcaatattgctgacaatggcccggtcataccccagcagggtattcagcaggctggactttcccacgttgggtggtccggcaatcgccgtgcggattccttcccgcagcaggcggccgccctcggcggtccgcagcagcccggaaagcttttcctccatgctccggagccgcgccagcaaaccggaagcggtgtccggggaaatatcttcatccggaaaatcgatataggcctcaatatgggccaggacgtgaaccaggctgtccttcagttcgtccacctgggagccgatgcccccgtacagctggctttgcgcggccttcagggccaggtcgctcccggcggaaatcacatccatcacggcttccgcctgggtcaggtccatgcgaccgttcaggaaggccctcttcgtaaactctcccggttccgccgggaaggctccgcactggtaaaggcgtttcagcaggcggtccgtcaccagcatgccgccatggcaggagacttccacggtatcttcccccgtataactggccggggccgggaaccaggtgatgagcgcctggtcaatggcggttccctccgcgtccagaatgcgggccagcgttgcccggcgcggctggaggcgttccgtgaaggccgcgggggtgcattgtttcaggacggccatgcagccggggccgctcatgcggatgacggcgatggctccctgtcctgcggcggtggcctgcgcggcgatggtgcgttccgggtcaatcatggttctatggattcaaaaaaaccgcccccgagcaacttgccttcgtcgtaaaaggcgcagacctgtcccacggccagcgcccggaggggcgtgtcaaagctcaggtgcaccttcccttcttccagatattcgcaggaggcccattccgccttggcgcggtagcggggctgcgccatcacgcgggagggcaggggcgccagcgtattggaaatgccgccaaccaccgcatgggccgcatacagtccctgcgtggatgcgtcttcataccccaggatcaggcggttgcgtttgacgtccttccccaccaccacataggcgatgccttcccgcggggaggcgatgccgtggcctttcctctggcccatggtgaacaggtgcaggccgttgtgggagccgagcaccttcccctccgtatccacgattttgccgggtttgtccggcaggtagtggcgcaggaagtcgctcatcttcacctggccgatgaagcagatgccctggctgtccttcttgcgcgccgtgggaaggccgtatttgtccgccagcacgcggacctccggcttcagcaggtcccccagggggaacacggcgcgggctgtctggttcggacgcatcagggacaggaagtaggactggtccttgttagggtcccgcccgcgcaagatgaaggagccctgcggcgtatccagcctgcgggcgtagtggccggtggctacggagtcaaacccctgctccagggcgtaatccagaaagacgccgaacttcatttcccggttgcacagcacgtccggattgggcgtgtatccggcgcggtagccttcaatcaggtaattcacgatgcgggcgcggtattcgtccaccaggtcgatgacccggaattcaatgccgatttttttggcgacggccagcgcgtcctgaatatcctgttcccacgggcattcgccgggaatgccctcgtcattcacccagtttttcatgtaggctcccaccacgtcatgcccttgctccacgagcagggctgctgccacggagctgtccaccccgccggataagcctacaagaatacgtgccacgatgttgaaaaagatatgggtgtgatagggaacctgcgtttgggaagtctttcccgcctgcccctgtaaatcaaagatgcccccgcaagccaagacaaaaagcggggaagacgattattcggacgtaacctgggaaaacaagaagatgccttacagtctttttatgcaggaaagggtttgcactagtgacgcttttgttgtccggatttagatgccgctttaatttttctgtttgggcaatcctttgtaaaggtaggccgctttcggcacccggccgacggttctgtccagcagggccggaatgtccttgtccctgtatccggccagacgcaggtattttttaacctcctgggccttggtcgggaagcaggtcatcagttccctgataaatccgcgttctttgcttttgatggcgaattgagcgttgttgcttctcgaactcagcgcgcttgtcttgttgaacagcttggtatcgtttccttctggcattccggaggcatggtcgatgagcatgtgggcgaaaatttccgtagcttcaaaagcataatctacctggctgtggaattgtttgatgatcagagcttttgcggataaataaaatcgaagggcctcttccctgcctgggaggctgctattcttgtccgttagcgcaaggaaagggatgctgttcgtgaaaaactcttttgcgtggtgatctacgctagtgtaggtagcaagccattcgacattttcgtaatcgttgaggtcaatgaacggggccttggcaatcagatagcacaggaaaagcccctccgtcagctcctgaggggtgacgtcctttttccggtagcggttggcttctttcaatattttatccgccccttggtagaacggaatgatctggccactgtccagcagtttcttaagccgcaggagttccgggttttgcttgttcagattcctgatggcggaaggaagggggagcccgccctgctccggagaggctgaacagggaaaagacagcgagtaaaggacgaataacagaaggaagggataagatttattcatgatgctaaaaacaggaggttatggattggcggtagagtcggcatgcagggcgtcgtctgctgtgctgcgcgtgacggtgcatccgaatttggtgatgcttaccttgatatttttcaagcccctggtgggggagtctttattggtttccctttcatcttcgtactcaaaactgaaatcctgggaatacgtgtcattgccaaccttgcagcagtccttgccgtcggcgtgtacgtaccacccgcaggtccatgaaaaggaatcgggaagtttcatgttctgcaagtgccttaagcgaatctccttctccttgtcccatctccagccgatgttgtcatgatggtgggcattcagggcattgggccacatcagctgttttcccggagtatgcaccggtttaaatccttccgggtcttccgcccgttccatgatgggaacgttgctgaaactgaccgccaagggaagaaaagtcacgacaagcttggaggaagctcccggtctgtctttttccttgtcccggggatgtttttccacccgttttccggaatgttccgccttaatgtcagagggaatgagaatgctgaaaacggagggttccctttccggcaatttttcgtcaaggctggttttaactcgaaccttcaggttagtatcctcggtaaggtttctgctgatggtcagcgtagcttgattaatatcgtcatttgatttctcaatgctggccgcattctccggctccagggaccattcaagggaatccgggtctacgtccctaactctcttgccgttcagggtcaaggtgaccacttctccaataccgactttggtgcgtttcctgtcctcgtcctggtctccctggtcgatgaggcattgaggagagacaaacttcgtttccgattcgatgtacagggagcggtcatccgtggcgggaatatcttccgcatgcgcaagcgctgccagggcgtgcagaaaaatgccggtagaagaaaggcggaaagaggggaaattcatgccagggtgcgagctgaggagagttatgctcatgatagtcttccgccccttttaatgtcaatgcatccaaaaatatgttagatacagtttgccgggggaagaaacgggcggttttccggatgtttaccgtcctaggagggggctaatgctccagctcccgtatgatgcatttcgccagctcccggggggaggcgaagggggcagccggaagttcccggagccattgctcccgtttcaaccaggtacgctggcgtttggcgtattgccgggtggcgagcgccagtttcgcctggcaggtttcacaggtgatttccccacgcagcaggctgcgtatcaacgccaggccaagggtgcgttccgccgtggcggagcaggggcccagggcggctgcttcttccacggccccctcctgcatcatgcgtgcggcgcggagggcgattctcccgtccagttccggaacttccctggtgatgacccagccgggccccaggggcggcttcagccagttccgcttccagaaggaaaggggttttcctccggcaaggacgatttccaggttgcgttccacataccgccggttggaagagttggtcagggctgcgccttccgggtccagggaagccagcctggcgtacaattcttccgtggaacagtccgcaaaagtggcgcggagggcggcatcccccggcggcgcttccgacatgccgtgggagaggaatttgaagtacagtccggagccgcccgtgacgatggccgtttttccgcgggcatggatatccttcacgcatcgcatggcgcggtggtagtgttccgtggcgtcccagggcatccgggccggaatgatggataccatgtggtggggaacgcgtgcccggtcttctggggagggagccgccgttagaatgggaagctcacggtacacctggtaggcgtccgagccgacgatttccgcacccagcatttccgccagttccacggccacggcggattttcccgacccggtggggccggcaaggaacagcgtagagggaaggcctgtattagaaatgccgggcatggcgcagtcaggatttttccggatgcctgaggcgttcgggcagcggcttgttttctgcgggattgccgatggcgagacagccggaaggcacatccctggtgacgacggctccggcggctaccacggctccggaaccgatggtgacgcctttcaggataatggccctggctccgatgaaacagccttctccgatgtgaatgggcttgccgtgcccgggatttccccacgtgctgccccagctggcgccgctccggggatagtgcatgtcgttgtccagaatcagcgtgtctgcgcctatcagcgtatggcgcccgatgtggatgccgttgacgcaaaccagggtggctccgctgatgccgcagccgtcctccacggtgatgcgggcttcattggaaagggccgccaggcaggcatggtgggaaaggaccggattcatccgcgtcatggagtggatggtgacgccgttgccgatggtgatgcaagctcccggaaattttttaatccggggcagtccggacaggatgacgcccgttccggtacgcactccccggagcttgagcagcaggcagcctatctttgaaaggaactgaataatgagcttttttatcatgggaagaaaggcgaaaacaggttttctttggaagctccggaggtaaaagaaaaacctgcctgtcaggaagccgtgtcttttttctctttcatctccagcagcgagccatagacgtccataaagtcttgggaagtagtttgaatactgagcttcctttttatttcctctattccgtattttcccatggcaatggatttatccagggattccgtcacggcaaggacggcttggcgaatggcttcgctgtctttgactgggaggatgtatccggatttgccgtcttcgacgtattgtttgcttccggcattgaccgtagtgataaccggtaattccatacagcgggcttccttgacaatggtgggtcctgtatcggccagagttggaagtaacaggcaccaggccgtttccatctgctgcctgagttgcatcctggatagttccccaagccaatggatattgggagggcatccggaatttagcttggtgcgtagtttcccgtttcctgcaatataaaggtctatatgcgctagggagggatctttaaaggcttcaatcagaaagggaagacctttacgttcattcagtgatcctgcgaacaggcaggatggccgtgtactgggagcgcgtttcttttcctggaactcggactcaatgccgtagtcgataagatggatggaagctgccgggttgagtttccggacacattccgcagcccatggtgattcacatgtaatatgctggtatgccggagttgttcgtttttcccagaatgcttgaaggtgcgccagaaagggcattttactttcccggcaataggcatgcagggccccctggtatgataataatcgggaatacggctggttcatgcatgccttggcatatggaaattcaatgccccatgcatggaccagggctggtttcagggaatggagaagaaggcgtattcttttagaggcaagaaaatgcccgcttaaaagtcccagagccaaacttggatcaggcagaatgtgaatggtctggcctttcagttgccggacggtatgggcctttacatattttttgagagtaatccaatgaatttcatagcgtttttgatgagccagatcgcagaaaaaagcataaatccatggaatcaaggtgtggtcttgatcttgaaactcttcaggaagcaagcgtcccaaaggcatgtttgccaaaatggcgataacaggaagagatgaccgattttccatataaaaacagcaaggattattaataacgcggacgaattgaaaagtccagaaaatgcgcaagtatgatgatgagcgccttggctgcgagcaagatgaaaaaaagattgtgtctgttttctatctggaatcccttttttaaactgttacaataatggtctttctttaaaacgggagacttggtctccgcaatctcctattgaaaaattttaacgcgaaaattctcataactgagaaacttggctggtccggaaaatgcaatgatggaaatggcgagaaggcgttttaccgtgggataacgttcgtgaggaaaatagccggggccgaattcatcccatggaatcaattcaatccttctgctttggggtacgggaggaggcaatggagctgagcaggtcttcccattgttgatatacgactgatgggtcatactgttcctgccattgccgcagcccctcctgcccccggcgctcccggaatttttcgtccgtcagagcccccacggttttttccaatgtggcggaggatgtttttttcaggatgatgcctcccttcagggtggaaacggctcccacatcgggagcaaaccatgggatgccgcacgacatggcctccagaatgcaaagcggctgctgctcctgataggagtaaaggaaaacggcggcgctctccataatggcggcttccacctccggacggggaagattgtaaagaatcctgaatctgggatcgtccccaatagcctgctccatttgctcagcgtaggaattgcgttgcggaacaaggaaaaggaaaacgatgttgtccagcttggtttgttttacatgacgaatgaacagaagctgccgcttcgtgttgcaggcgctggcgggacacgtgaaaacgggagcgtgggacaatccgtatttttcccggaagaaaggaacggcttgtttcagcgccggaaacgtgttgggaatgcagacgtaacgggaaagattcagtttggagcagtagtaataatcgaaccctttgaagggcgttccataggagtcaaggaaaacaaggcggtttaacggggattcccggtgtacgttcagaatgcccctgcgtatttggaaaaaggagcagagccattttttcatgccgaaaaaaggagggtagtccacgcggaaataggaacggaggttggtgggcatgccgtgggaacgcagaaaaaagggaaggcactcttcccgtgcgcatgccagcaattccttccggcaccagcccgaccaggaatggtaaacgataaaatccggctggatatcttttaaaaaagcgtccaggtactccttcaagcggttggtgtcgtccgtcagggaatccggcagggccgtgatggggcagcatcttgtgcgggaaggatcctccggcaaatcctgctggcgggtgaggacgtgaatgtcccagcctctggagcccaggctgtgcgccatttcataggccgccatacccacgcctccttctccgggagggaaggcataggcggcaatcagaatccttcctttgctcacgggcggtaatatagatgaaagagggaaataaaacaagaatgctttatggaacaatgttggataactggtatggagcaggttgtggcttatggataaaaagatgttgatgcagtggaatgttgtgctagattaatgccgcttttcatggccgtatgactggcagaatatcctgtttgtattttaccagccggataaatgaaaccgggtatgaatgatttctgtattttttgttttctcgtgaagagaggataagtccatggaataaatggtatgaaggagtctcgcgtaaaaaaaagcctgttgaatgcccgggtgaacctcattttttatgttctgattctcatcatttcatttttttcaagaaaagttttcctgaattgcctgggcgctgatttcgtcggtttgacgggaactttaatgaatctgctgaattttcttaatttggcggagcttggcataagcacggctatcggatatgtgctttataaacctatttttgaacatgatgaggccagaattaatgaaattatttctgttctgggttacatgtaccggtggatagggcgcatcattattgccgccggattgctgctttcctgttttctgccgctgatcttcccttcaacggggttttcctatggaatcatctattttgcttattattcttttctcgcctcttccctgattgggtacttcgccaactacaggcagactctcctgggggcggaccagaggaattacgtggtggccttctatttccagacggcctccataatcaaaattttatgccagatattatctgcgtggtatacgggcagctattatctatggataatgatagaactgctgttcggcattatttattccttcatccttaactggaaaattaatcaggtatatccctggttgaaaagcaatgtggctctgggaaaggaactgttcaggaaataccctgaggttattaaatataccaggcagctctttgtacatcggctgggttattttttccagttccaggtcacgccgtttctggtttatgcatttgtttccctgcagatggtggcctactatggcaactattccaccatcatggataaactgttcctcctggtcaacaacctgctgggcagcacggaagccagcgtgggaaatctgatcgcggaggggaatgcggaaaaaatccgcaaggtgttcaatgaattattttccctgcgcatgctgatagccgggacaatctgctttaccctttaccagcttctggagccattcatcacgctttggctgggagcgggctacatcctcccccgggaaatcatgatcctgatcatcatcaacctgttcatcactgtcacgcggggtgcagtggatcaatttttatacggctacggcctgttctgggatgtctgggcgcccattgtagaaagcgtgatcaacatttccgtagcaattatcggaggttacctatggggattgcccggcattcttctggggggtatttccagcctggtgcttattgttggcatttggaaacccttcatgctgtacacttggggattcagaaagaacgtgatgaattactggctccaattcggttaccagctggcgctgattctgatacctatggtgctgatgaactggatttggaaatattcccccttgcaaccctccgggtctttcctgaactggtttgcctgcgccttcctgatggttgtttcctatggcgtcataacgattcttttaatgtattgctgtacgaaaggcatgcgtggcatggtacatcgtggactggcaatagcggggacgcggctgctctggaagaggaaaaagtaagcgttccctatggggcattataaggattttttacttccttggcaggaaaaataagtgcaactcttttttattcatatattcagggtaactggttgatttctacgacagcggtctgggcatagtggtggccgacaaaaacccacacttgccggggttgcccggtcgtgttgggggcaagcgtcagggtgatttggccgccgccggctggtatctgctccgcggattggctgcaccatacggcggcggggtcatgcccgcacatcgtgtcgttaatggcgtacacagcctccgccagcgtggaggataccgtcagcgttacttcaccgccttccgctcccacctccagcgcggaagccgtcacctccggcacgggcttgatcgccactccgtccatgaccaccttccccaggatatccctggccgccgtgctgccgggcaggctgcccgtgttcacccgcattccggccattctcaaccctgtctcctgcgcgctggccacttcatgggctttgactgttgctgacaatacagccgtatggccgccgccgcagaaccgcgctgtcatgggcatgacgtattgcccgtcgacgaacaactcccacctgttttcaacgtagggatggtctgccgcatgccggggcgccattgctacggcaagataggtggcgtctggggccagcgcccacacataccgggcttccccgttgccgcgcccgtaatccgtgccgcgaatcaagcaggatgcagaactgcccaggtaagacttgccgtataaagtcgcctgccacgcgggcgtcatatcataaccgttgtaattattaacggaattgagcagaggaaacctgtaatcctgccctgttccggcatggtcataattgcaccagtgaatgggatgcgcatagcatggcgaggacgggtttgtggtgcatccatagccatgtgtggtgcttcccagcatgatggacgccttgtccgcccccgtaatgcaccatgccgccgccgccgcaaaactggaatctttgtaggttcccagtgaatgagcaaatttccagggcttggtgcccacccccagcaaggaaatgccggcggcgggagtcattctaatgacatggtcatatagttcattttcaatgatgccttccttgacggatgcattggcgctggaatacttgtaaatgctgagggattgcatgcgcgccagcaatgccacccatggcggaacggcggcataggaggcgctgcgcaccaggagccattcccgtctggcctgctcttcgagcatggagtcccaggacagggcctcctgggccgtggcaggtagcggcacgcgtacgcctccgttggcgttgacggtgccggcaaaggttccggactccgccatcatattttttaaaatggcatcctctccgggttgaacgccgtcctggacaaacaatctcgggaccggcgttttaaaaatctgtatgacaaaagcgtcttcatcggatatttctaccgcatccgtcggagccacaaaaccgtattggcccgcttttcctgcttccagaacaagcatgagatccacgctggaacttaaaacggcatgtactgtacaagcttttgtacaagtcattacataggaacttcctttgatagtgtcaactttcatgaataaactaatttttaaaatactccctacttgccgatacggtcatcaggtataaaacgttgacgcattcttgcacacgcttttctggtctgctttgaatgcgtgtactgccagaactggttggcggaaatagtcaccgtggaacccggtcgtggaaaactaatggaggcatccgtaaaatgatctttttggacaagccggaaaatcactataccggaatctgggcgtgaaaagggcttccatgaaaaaccctttgtacgcaaagctaaaaatcaaaaggaaaaaatgggcttattctgctttcgtaataacgtttatgtgcgggaaagacaggcaaattctgaagctgtggcttcggatcatcatcagccgcggaatgaaaaagacatgagcttcgtgcatttgaagcatttgcagccatggaaatcccgagtggacagtttcctgactcggggaaataccaaggaaaaaaggaatacggatggtatcccgaaaaaaaatggctgatattggcgttccttaataaaaaagcgctctgtaaatcggttgcttcctggtcatcgggaaaggcaggaaaagctggcgcaatcctactggtgtttgccctgcaaaagccgtttgcccttccccaggaggcatctcattcgggaaacaaacattcgggcagaatcattttgctttcggaaatcccggatcttatctttccacggagattttttccaatacttgtagaacagcccgttatcctgacgcaggctattgggttgccagggcttgggatgcccccagtaatggatgatgccgggactggtggcggcttccaacaaatccttcggctctaggggattattctcgaagctttttattccttcccagcggatcgaccaaatggcgccgtcgcagatgttccacatgggatggagcaagaaaatacgttcttgataacatgcgttcaaaatatcctgatcctgccaggagagatgatggatgttgcttttcgcataagataaaacttgggattcaaaccgttcttcacgaattttcttaatatgataaagaacaacgcctgcattgatgtaaatggaatccctgcccagattcatttcctgtttccagcgtgagaaaaactcctcagtcaaatgttccgtagtgaaaacgccggcgatgaggcaatccccgaactcggtttcatacatggaactgatatcccggttgaaaatggtatcaatatctacatacagggcgcgttccaccgtggcgggaagttcccctgcgaggccaagacggtaatacgtcgctgccgaccacttggaaccaacaggaaaatccttgtatttatccttcatctcaatgaagtgtaaactcaggcggtaagaccgttgcagagaatttaaacgagccgtattatcctcgttcaaaccgtctgtcatgatgtaaatatcggcatgaacgtcggctggtaaattctccatgagggaaacgatgcttacccccgttcccagcgctcccttatcgtctgtagcgtatacgatgttcatggtaaaggtccggcatggactatggcaggtgaagaaatggatctgcgtttcccatccgcgttactagtttctattgagaaacaacatggatcttcccattctttccaggcggtccagccagacgcataaggaaacggttctattcatgagcgcagtaaatgattgttccattccttcctttgcaaaacatgccttcgcataggcgtcaaaataggtccggttcaggtagggatgcgtcaccttcctgattctgccaagcaaggagatcctttcctcttcgtcaagagccagcaacctgttggaatgcaattccctgatgatcaggaaatgaacggcgaactgccatgtgggttttttcatggcttcaagttcatccagcaagggcgcaaggagcgtatgaatggagacatgccggtaattcacatcatgcatggcggatgatgccctttgccggtaaattgaggtgacggttcctcccagcccgatcagggctgtctgcctcatgcaccgcgtccagtacaggccgtcttctccataggacatattttcctcccaggacggaagttgaaacgcaagagatgaactcaggataacattgcttgggtgcatgaatagcaatccccttaaccccaatttccggatgaatacaggatgggatgggggacgtggcgctatgttggccaactcgtccaggatgtgacggttggaataaaccaatatctcaggatgaagatggaaaaaattagccgccagcgccaaatgttctgggtaccagtaatcgtccccgtccagaaaagcgatataaaggccttgggctttcttcattcctgcatttcgtgctcgcgaaacgccgccgttgcgctgggaaataagatgaattctttggtcgtgaaaagattggatgatagaaacggttccgtctgtagaaccatcgtcaacgataataatttcaaaatcctgaaatatttgagccagtaccgactgaatggtagcagcaatatatttttccaggttataggctggaataataacgctgaaaaatggcttctgcatttaggaaggagatggaacgcttttggagctggacgggaatccggatgtggaggaaagacttcgcgctgattctggagtaataacaatcggtaaatggaggagggaaaaaatccctcgtgacgccttcattgttcatcaacgcattgatggaccaaatcatagcggattaagaatccgtgattcgtcaacggaaaaatctgggataaaagtttgttaggggtaatggggaatataaggatgacggggaatcttttaatcggggattaaaaagattctcctatcatcctgatgttccctattacccatgtgcaacttttatggcggatttttccgttgattaatcgccggattcttaatccggtacaaacgtgacgccttatctataagtactgtggatcatagtccatctcgggattcacatttccttttccgtgccgcttttcttcatgaatcctccggaactcccctccatcagcattattctgaccgggcataatgaggaatattgcattggagatgccatccggagcgtattcgggcaggattacgaggggccggtagaaatcatcctgtctgatgacggttcatctgacggtacctttgcagtcatgcaggaaatggcggcggagtaccggggaccgcaccgtgtggtattgaaccggaatgaaacccctctggggcgcgggccgcatatacggcagatggtggagctggcctcccatgaatggattctccgccaggatggggatgattgttccttcccctggaggtgcagggtgtttgccggggcggtggcaaggcatccggatgccgtggctgtcgtcagccagatgacccgcgtgtatgaggaagccggcgttatgttcgaattcccggcgtttcccgctgttccggaagaagccccggtgatcaggcttcaagaggggactttctcctccactgcccattacggaggcagtatgatgatcaggaaaagcgcctgccaatgggggcgctccctgccgatgacggacaattttgaagatgacctgatgggatttcatgtgtggctgcaaggcagcatctatgaattgccggatgtctccctgtactattacaggtttgccgtcaaaaacatttgtgccgtcaacagtgcagcgcggtttgccagcatgaaaacggctgcggcctttgaaaaaagggatcggatgatgcggcgccagttgaagaaaagcaaggaagccggcctggaactgtgtaaggacttgttgaagcgccgcactccggttttccgttcgcgggaagaattgcttgccgaaatggaggaaagaagaaaggcgatacgttgcattgatcaacatcagaactggtggaactattccttccgccgaaggtgggcgctaaggaagccgggatggatgggcatcgtccattgcttgccgcaaaaactgtatctgttctgcatggtcttctttttcaagctcaggaaagtgaaaagagccgtttgcggagtgcggtagggggtgcctgaagaccccggatggaaagggaccgccagggcagggaaaagctcttggataaaatctccgtgaagtgttcatggaaccatgttctgcatggctgcttcctctgctgcatggggaatagcgtgtgcaggtttgagtgcgtggaatgggaaaaaggggatgaatgcgtattcatgcgcgaaaaagaagaagggggaatcttgataccgatcatttggcagatagggacgcagggggatgaactgcatgcagggaagggcgatgcataatctttgtcgataggtgaaagcctccgggaagcgtcttttcaaaccgaagggattgatcggagggatgtagggaaaaaatgaaggaagtgccgtatttcatggaatcatccttctttggttgtccggaaaaacaggaatcaggataggaaagcaaaaagcattttatgttttgttactaaaaatgagaactgatggcttaactgcgaatttctaatccggattcaataaaaaatacttaatataaatggtgacagttgaggggaggcaatcctggaaagaaatgtccttcctgtcgtgcagcagcatgaagccgtataaaaagctcataatatgcatgttggtaaaccttcatgtatccggacaaagaacccggattagaaatcctgtatttctgcaccgagttttaaatctggaaaatggaagaaaagaacaggcatatccgggatagccgctatggttggatagaattcagcgtgattttaatcgcctataatctggagcattatttgagaaaaaccgttcaatccgtattggatcaggaatttaagaattttgaattgatcatcgttgataacggctctacggatggcacccttcaagtggtggaattttttcaggattccagaattaacgtcatttcccaggaaaatggaggcgcttcgcatgccagaaacacgggaatgaaagcggccaaaggaaaatacgtggcgttccttgatggagatgactactggtatcctgatcatttgaagatggcatatgattttttccggaagcatcccggcgtgtacgtttatgccgccagatatacatggaacagggaggattgcattccccgcaggaagggaaaaccgtgctccttcgtagtcaggaaactggggttaagagggcttttatccatccatacgagcagcgttgttctgaattcctccctggcatcttctcttcccttgtgggaagcaggcatgaaatacggagaggatgtcctgtactggatgcggttaatgagaagaacggcgatgattggcttgggaaaaaaagtgggctccatctatgtacagcgtgccggctctgccatgcaggagcaggcttgccgtgatatttccgtggaagacctgctgacgcgccggctggaggaatggaaactgatgccgcacagggaatggcagtttgccgtgcactttttaattttgcgggaattacatgtgcccagactgctgaagatggagaaagaagcccgtatccggttcctcaaagagattggttccatgctgcatggatggctggagggaccctgttttaatgcttatgtgcaggcctgctcgcgggaggagccggctgagatggaaaaggcgtttgacaagctccaggcccgggtaaactgctggtgcgtctgggcggacagggcggaaagatggtgcatgcgcccctggtccctcctggtaaatgggttgtataagggatttctatggggcaagtaaattccctttccgcaagaggtccggaaaacccggaaaaagggatggaggagaaaaggcaagccgctcttccctgcgtcaaccggatttactggtaacggcttctccgtagtaaaaagaaaaagcgccttcccacggatagtggaaaggcgcggtaaaaggaaagaaagcgtataccggattaatacacgtcccgctggtagcggcggtgctgtttcatgtccgctacgtactccgcagcttcttccggagtcttgtggccccaggtctggataacttcatgaagggcggcgtcaacgtccttggccatgcgggaggcgtctccgcagacgtagaagcaggcgccgttttccagccatttccagagctcttcgccttcctggaccatgagatgctgaacgtataccttcttctcctggtcgcgggaccaggctacggacaatttcaatctgccgtccgccgtcaatttggccagctcgtcttcatagcagaaatcggtagctttgtatgggttgccgaagaacagccaattgccgcccttgtccccggaggcaatgcgttcctcccagaatgcccggaagggggcgatgccggtgccggggccaaccatgatgatgggggtatccccgtcttccggcaggcggaaattcttgttggtatgcacgaacaccctggccgtatgtcccggctggaggcggtccgccatgtaagtagagcacacgccgccgcgcttgcggtcccgggccgtgtagcgcaccgcgcccacgcacagatgcacttcttcagggtgggcgttcgggctggaggcgatggaataaaggcgcggcatgatctttttcaggatgcctgcaaaagcctccgcagattcaaaggaggccggatactccgttgccaggtccagcacgtcgcgtccccacaggaaatcgctgagcgcgtccttgtccccggccagcagggtttccagctcctgactgccggaagcggccgcccatttggtcagcagggccttgttgacattggtgatgtcatagcagttgatcagggcgtcccgcaggctggcggctcccccctccggcgtgggaacctgggaatccgggttgaggccgagcttttcaatcagggcctccaccagggaagaatcattggagggaatgacggccagggcgtctccggcaacgtacaccattccggcgccgtccaggctgtattcaatatggatcgtttctttcgggctgccttccccggtgaggtgcttgacggaaaggacgggtgcggggaacggattctttttgccgtacggttcggttgtcatgtgtaatgtaagtttctggaatggaataacggaaattaccagcggatggctgcggcgccccatgtgaggcctgcgccgaaggtgaccaggacgacattgtcccccttgccgaacctgccggtgcggcgcgcttcgtcaaaggcgatggccacggcggcggcggaagtattgccgtatttctcaatattgatgaacaccttgtcctccgggatggaaagacgttgggccacggcattgatgatgcggaggttggcctggtggggaatgatcagcttgatgtcatccgacgtcaggccggcgcgttcaatcacgctggcggcggaatccttcatgcggggaactgcttggcggaaggtctccttgccgcgcatggcgagggtagccaggcgttcgtgggcgttctccaccgtggtggggcagcgggagccgccgcccggaatctggagcaggtcatgcagggcgccgtccgtgccgatgtccgtagcgaggatggagccttccccttcctctcccgtggaagcctggagcacggcggctccggcgccgtccccgaacaggacgcaggtggtgcggtcctcccagttgacgacggtggaaagtttttccgcggcgatgatgagggccgtcttcatctggcccgtgccgaggaactggacggccgttttcatggcgaacaggaagccggagcaggcggcggaaatgtcaaaggcggcggcattcttggcgcccagggcgtcctggatatagcaggaggtggaaggagtgaacgtatccggcgtaatggtggagacgatgatcaggtcgatatcctccggctgcaatccgcaggattccagcgcccgctgggcggccttcgtccccatgtgggaggtgtactcgtcaggggcggcgatgcggcgttccacgatgcccgtgcgttcaatgatccattcgtgggaagtgtccaccatcttctccaggtccgcattggtcaggcggcgttccggaacataggagcccgtaccgatgatcttgacgggcagtcttttaaaggcgatatcagaatttgcggccatagctttgggcgtatgatgaacagaaaacgtcctgacgttttatgtggggacagtctaaaagaaaggaggcctgatgaccagcacaaaacacgggactcctgccatgccgtaaacggatggcttacaacagccatccctgtccgttggcgggcggcgtggcccccatcttgagataggcggaaggcatcgccacgcgtcccctgggagtacggttgatgtacccctgcatgatcaggaaaggctcgtgcacgtcctccagcgtggaagcgtcttcccccacggccacagccagggaggaaagtcccaccggaccgccgttgaacttgtaaatcatggcttccagcaggcgcttgtccatctcgtccaggccgtcgtcgtcaatctcgatcatggtcagggcatcgtgcgccagttgctccgtaatcacgccgtcgccgcgtacctgggcgtaatcccgcacccagcgcagcagggaattggccacgcgcggcgtgcctcgggagcgcagggcgatctgaagcgcgcctgtcggttccacggggacgttcagcagcccggcggaccgttcgatgatcgcgcacagatcctcctgcgtgtaataatccagccggttcacgaggccgaagcgggaacgcagcgggctggtcagcatcccggcgcgggtggtggcccccaccagggtgaacttgggaagattcagctggatggagcgggcgttcgggccctggtcgataataatatccagccggaaatcctccatggccgggtacaggtactcctcaatggccggatgcaggcggtggatctcgtcaataaacaggatgtcccctttttccagattggtcagcacgcctgccaggtcccccgccttctcgatctgggggccggacgtcgtatggatgcggcagccgacggcattcgcgataatattggcaagcgtcgtcttccccaggccaggggggccgctcagcagaatgtggtccagcacgtcgtcgcgctgtttggcggcttccaccatcagcatcaggcggtccttgatcttctcctgcccgcggaactcactgaaggcaggcggtcggagggacaaatcaaaggcggaggggggtgtctccgtagtgcgtgtgtaaaaggactctcccatgcgcaggactagcaaacctgtctttgaggcatccgtcaagatggaagtgcaggcgggaagcgccttttccgggacatgccgtaagcctctggtcttttttgattgcggatggaatacggttccgtcagaatcgtgcgcaatgaaatggcgtatcctacctcttctgctggcgctgggcggcagcgtttttgccgctggcggcgtggaatcccgtccctatcacatcatcccggaacccgtcgaagtcagtacttcctccggagtatgtaaatctcccaaaatcctcaagcagaccgccaataaggccctggggcaggagggatacaaaatcaccatcaagccgcagggcgtggaaatccaggctggcgaccgcgcgggcctcttttacgccaaaaacacgctggaacagctccaggcccaatacagggacggcggcattccctgcggcgtcattgaagacaagccccggtttggctggcgcagcatgatgatggacaccgcacgccacttcgtgccggtggaggacgtcaaaaaattcattgatgtgatgtccttctacaaattcaacaaactccatttccacctcacggatgatcagggctggcgccttcccgtgcccggataccccaagctggaaagcgtggcctccaggcgtaaggaaacctttggcaacaaaaccccccatggcggcatgtacaccaaggaacagctcaaggacctggtgaaatacgccgccgcacggaacattgaaatcatcccggaaatagacgtgcccggccacaaccaggccctttgcaccgcctatccggaattcctctgtttcccgaaccccaagctggaagtgcgcacgaatgcgggcatctcctacacgctggtatgccccggcaacccggacgtctggaaattctacaacgccgtcttcaatgaactcaaggacatcttcccgtcccaatacgtgcatctgggcggagacgaagcgccggaagacaactggatgaaatgccccaaatgcgcggacttccgtgagaaagccggcatccgtgaggaaaacaaaaaagccgccgcgcaaaaggaaatggtggaattcttcactaggtgcgccaaaatgctgaaaagtcgcgggaaaacggccgtcttctggtatgaacccatgggcaaatacccggatggagtaatcgtcaccacgtggagaggcggccacacgcctaaaacggtagccaacaccacgggcgacaaggtggacgtcatctgcgcccccaacggcaaatgctactttgactatccccagcttccaggcgactggccctccggccagccggacacgggctggatgcccgtcaacacgctggaaaacgtgtactccctggaaccgggacacggcctctccgccaaggaaatggaacgtgtgcgcggcgtagactgctgcctgtgggcggaacgtctgccgaacattgagcgcgtcttctaccaggcttacccgcgcgctctggccctcgtggaaaccgcatggtcccccaaggaggtgaaaaacctgaaccgcttcaaggacaaactggaattccacaaaaaattcatgcaggaaaaatggggcatcagcctcgaacgtccggaaaagaaataataaccgaacagcaagagttccttcctgaaagacgcaaacgttgaaaaaataggaagaccgttttttgtctttctaaaagaagagaggcatcgagcacgaagaactcaacattgttgaatgacaggcttctgtgaataacagaagcctgtttttttgcatggtatgcatgggggctcttaccatcccatttccaggattttctaatacccaggcgcttccatccttgtcagagaacgtccagaaacgagagaagagcttgagaaaaacaggaaaatgtctcccaagtgaaaaaaagattgccaaccctctcttctaccgttacattgctcccgctttcctatctaacacaatctatcaacgggcaggtgtcagagtggtcgaatgagcacgcctggaaagtgtgtgtactggcaacagtaccgagggttcgaatccctccctgtccgccatcaattttccgccgcaatgtattcgtaatgagtatattgcggtttttgtttgtaggggtatggggaaaatattggggaaatggttgattttaataacagtatcagatagtgtactaaacatgattgacagtctttgagttggtctcaaataggtaacaaggaattcaaaatggcatatacagttaagtcatctgaaagaacacgaaagtctggtgccgaaacagaaaccaaggctttgttatatctcatgaattttcatcttgatagtgatgaaattcattattttattgtagatttttttaatgatttgactggaatgaatcaaatgtcaacaaagttgtgggatttgcaatctaaaggtgcccgtaatgtaggtccaaaagctattggaaaagagctcgtgacactttttaaaaactacatgagttcatttgatttttccacttttattctatttataggtagtgttacaggagcacttagaatagacgaaaataagacagcctttagcattgaaaatattaaagatactgctgttactcttattaaggaaggcctccttgaagaaggtttgtctagagaatatattaacgatgcagatcttacagatgccaacataacaaactttttacaacaggttacgtttataattgatgacgataaaaaacccagtgaatatgtaaaagcaattatcaagaaacaccctaatattattccagaagaaaaagtattagatgccatattcaacgagctccgtgatgaacaggcaagcaaaaagaatatttcggttgttgaaggtctcgttatagaaacatctgatgaggcgttgaattattgccgacatcttacgaataatgaaatacgtctaatggctttggggcgtataatcaatagagatcctttaagtaaagggatttcaccttcttttgtaaacatctataattcgtggccgcctgaaaaacagaaagatatgcttgaagattgtcaaagttctctttgtagagcgttgtttaacaaaaatacagctgaagggttttggaatctatttgagaatacatataagctcgttattcaaacaccaacagacaatgtgcgaaatatatttcaaaaattgataacaataccaaattgtacagaacgttgtcctgatttcgatgttttgtcacttaaatattttatctcaatagtaaaagacggtattcaacaatgaaaataattagagtcgcagttggaaatgcaaaagaagcttatatagaggataagtttgattcaagattgaatattatttcgagtgatgataataataaaggaaaaaccattatcattcagtctatgatgtatgctctcggaaacgaaccgactttcccaacatcttttgaatacaaagattattattattatattgaatttgaagtaaataataagaaatataatctttgcaggcgtaaagatcatttctttttaaaaaatgcttctattcttacaatttttgataatatttcagaactaaaacgttattggaataagaatattttttcattaccgtcaattataaaaaacggaattttaagaattgtcgatcccgttttatttatgcaattattttttgttggacaagataaaaaggatacatcaaatattgcacatcatagtttttataataaacaagattttatcgaaatgctctatgcttacatggggcttggaagttcacaaattacacaaaatgaagtagacaagttaaaagaaaaaatagccaatcttaccgatgaaaaaaaactacttttgcaacagcataagattttaaaatcgaaaaaaactccagcgacctatttaagtgctataagtgaccgactagcatttggagaaaagatatctagtctagaaaaaatccaagatcaaattgctgatcttcgtaaaactagaaatctcgcatcagcaagaaaaagcaaatgggaaacaacgataaaagaactccgttcactaaacagaacggtagctagtggagaattgcgttgtatggattgcaattctccaaacatttcttttggtgtcagtaaaaacaataaattatcatactcatttgatatttcaacgactgaaatgcgaaatgaaattatggaatctatcagtgaaaaaattgcttcctactcagaagaaattgacaaactatctgatgaaattggagtaaagcagcaacaactgcaagaactaatggacgatgacgaaatctcactcgaatccatcgtggcgtacaaaaaggatgtgttttcggctagcgatgcagaatcccggatcacaaaaattggaaaagaaatttcttcattagaaactcagcttgaggctagtaaaaacgcatcatcgtcaatacaagaacaaaaaacatctttacttacagaaattattgatgaaatgaataggttttatcatcagatagaccctgaaggaaatactgtttacagtagtttatttaccaataaaaatgaagtttattcagggagtgaagcaacagtttttcatttggtcaaattgctggctttacaaattgtaacaaaacatgactttcctgttataattgattcatttcgcgcggaggatttatccacaacaaaggaaaatatagttatcaaaattatcaaagaaattaaaaatcaagtaatttttacaacaactttaaaggaagaggaatatgggaaatatgattctattgaaggcgttaaccatatagattatggttatcatattccaagtaaaattctatcagaaacatttgttcaagattttgaatctttattaattgatttagcaataaagatttaattacttgattacttgaagagattgaattctatctcgaatagtattcattagattatctttcattaacttcatgatattattcattttattaaattcttttactctctctttttcagtcatattcactcggcgttcttgccatattttataagacccatctgaatttttttataactattttactcttcagctctcttattttttgctctatttctaaaacttttaaatcatcattttccacattaagtctcttttcaagacgttcaacctcttttataaactccatactagatttgacttgtgattcatacatgcgctcattggcaataccctctttcttaatagtttgcacatatataatttttacagcaggatcaaaaaacgaatttacatatgctaaaaatctcttgccctcattatagatattttcattaataaatggttttctatattgaagtatattatcacattctatccatttctccatacaatcgtcactgtttccactcaagaaggaaacttccagaaaggtacatacatgttcgatcttctcactcaaaaggacatatgtttcgaattctttttcaaattgagcttgaaaaacaaactttgtcttgtctaaatgagcattcttttgatctcgcagttcgtttaggtcgctctgcattttttgaagtctactttttcctagccatgcaagtaaaccacctatacctcctgtcgctaaaatattagtactaagtatttcccaaaaatccatatctacgtttctttataggtgtcctttaatgaagagcaagacattacctagctgctttctctggagaaaagacatccatgtctttaccttatcaaacctaaacataattacaagtctgcatcttctgacagatttgcttctaaggattcactaaatcttttccgtatctcctctttccttctgcaatccatttcctcctgttcctttccccattcgtaattatgccaatcctccatgcattctccaaactcatgagggatcatcaggactgggatcgtaaccccatgttccaatcagggacttcttctgaatgattatccacaactgactgttcttgcgctcaatccctctaggattctctctgttatttccattggcatttctcaatatcctgaacaacttccatagaaatcatttcaggattaattgctccaaatcattttttgaaaacaccttcgtacaaaaccaattgaccttggaaatgctttcaagggatcaaacggcaggtatactggggcaaacctctccatatcccttttcttccattgagcaagaccgtttttctcataatatactcatttgcatgtatttataatttttaaaactatttcctcagcaataaattctaggtatactgcggtatacattttagcatcctccatatattttatatccatagagtaagaccaaaatattcataactcactcattttaatatgtttttgaattttgtttcctgctttttcagcatttccaaagcctctatccgttcaatgtacagcaccattgatggcatcagtattcctgcaaatgcaattgggtgacgacggtaatccggttattttattctgaatatctccagaatcatttgtgaggatttacagataatttcccctactaattaccttgtttccagaataatttccgtagaaaccattttagaattaattgccctgtttcccttgattttggttgagagtccaagatcagaaatgtttttttgaaaacagcttcgtataaggccattggatggtatttctgaaaaattactgtcaaaaataattttgcctttcaaatggctaaatggagttttcgccttttctattcggtacattttctaatggagaaaaagttttccattttttgaaaaaatgattttggaacatttggcaaagtacccccttcatgtggaagcttgcctatatatgttggttggaaatggggataggttgtcaattggggaggcgtgtttggtttggcgggggtatggtaccatttgccgtgccctgtatggcaggaatagagtataggcgtaaaatgaaaaaggatggaaccattgctgattccatccctggataactagagcaggacccttattccttatttttcactataataccgttatcaatagtaatggggtcccaatcatcaagaataccttcaaaagtaactgaacttgaactctctaaattggatgccttttctgtttctgaatccttgagaaaaacaacgacttcaactctcgaaacatctaggagaggagaactgaatgagttgtctccaaagtgaactgtattattggagcgattcataaccacttgcatctgtaatgtcccgaaggatttctcaatctcatggactttcccagtccattggatttttttccctttgtatttcttccaagtattctctttttggaggtctgttttatcgctattctgtccgtaaatggatgaaatttccgaccattcaatgtccgaaaccagaagattgtctgtctcttctgtctccttatcgccttctgaaatcatggttatgaaaagaatgagacacattaatccgcaaaatccgtaagcacaaaccttgaggcatccttgggctttattcttttgcttgggcttttcgttttcaatatccatgttatttcatgttaaatgttccctttgccggcaactcccgacccatgttctctttcatcgtgccttctgctgtgacgattttgccgttgaatacaagattgagtttgaagcccacccaatttgactcaatttgcaaggttcctacattagttcctgttttatcaaagacataactacctgtaattgtactagttgtctcatggtcattggcatcatattcaacagcgccaaacatgacggttccggcactgaaaacaaaatctttggcttccaattcaaatccgtctccttcttggtagtctacatacatgcctcccgtgagagttttactttccagcgttaatggagcttccgtcccattgttgtcgtcactggatgatgagttgctgcaggatgcaagcagaacaaaggaagccaaggcagcacaacagaatttcgttgtggtaggaatctttctggttatctggttcatatttctaatgttggttgttcatcctcttggttagtaggtgataacgtttgaatatcgcgtatcttcacaactgtaaagaggtattttagaccgtggacataaatttctcatttctgcgataatgaatagatgtccaagcaaaatgtactcaaggaattaggagaaaggatcagaaacgagagaaaagctcagggattctctcaggaaggatttgcgcatgttgccaatttggatagaagctactacggcagcattgaacggggagagcgcaacatcacattttataccatctgcgaaatcgcggaaaaactgaatagggatgtagcttttttctgtcaggatattcctcctaccaagtcaggaaaataactgatcattgcgatagaataattgacgatcaatgtgttttatcgcttacgaatcccgtgtttcacggcatgatggattcatgaccggagctgcataccaacaaggagcacatgtccgcgtaatatcccccgaaggacaaaccctgtttacccaaaaaggaaaactgatggaatgttcttctgagtgtatttccatactcaggggaaacgccatccacatttgcgaccatcaaggaaacacgctatccacacatcgctatgcggaagacaagccagccaaagtcggttcatcaaaaagcatcctgttttacctcctgtttggatgcttgaccaaaataggagacgcatatcggttgtatcaattcctgggtagaggaaacgccataggagctgatggaggagatttgaactggaagaatatcggtatttggttcttatccatttccttctggattgcatgcttctttgcgacttcaaaaatgggaatcatcggataataaaaaccgactcattttacgacataaataacttacaataattgagttttatcgcatacgaactctcgtttccacggtataattaactcatacatggcggcgaagaagttcaaattatgcagactggttcaggaaaacgatggaagattccgggtgtactggaataccatcaatcccgatggctccaccaggaacaacaaatgcagggtcaaggacaggaaagaaggtttagagaaatgccgaatcctcgaagaagaactttcccaaaccggacttgtagaggaaacaatcatcgatccagaagacagaatcatgatcgaccgtttctacaaaaccaatccttccatctcacttgcggaattcatcagaagatacatgagcttcgtcgcccatcccaagcaaagcaggacagtcggagatctcttcaaggaatggaaaaagcacaagctcctgacagcatccaacagggaaaacatccgccttactctctccagggtcaacgtcttcaaggatgtattcggaaagaaaattgtcagcactatccagaaggatgaagtggaaaaatggctctatggactggatatagctgaaaagacacgccagcattaccgggcggccgtcatctcattcttcaaatggtgtgaaatcgacatgaccaacatcaaatgccccaaggcagtacgtcctgaacctggtatttattccgtcgatgatgccgtccaaattctccattacaccaaaactcatcaacacagaatgctagctcccttggtcatcgccatgttctgcggcgtcaggttgtccgaatttgaatacatcacctgggaggaactggatttgagtaatcccgatgaagacggagacttttacctgtcaggaggaaaaactggaagacgtatcgttcatctccccagcgttgccaaaaaatggcttcttacatgtgaacataccaatggactcgtctttgattttggacgatgcaagaaacatgtcgaccgcatttacgatgctttcagaagaacaatccctgaatacgttgaagcaaaacaaaacggataccggcacagttactgcacctacaaggtcacctgttttggcaatatggccagtgtagccgatgaaatgggcaacagcatccagatgatccgaaagcattactacaaacccaccaggaaaaaggatgctgaactctattgggagctgactcccgaatacgtcgattcactcaatctggattaaccggattaaacacggggcaaattgagcagattgtcgtactggtattcattgggttctgaccgtacatacttttcccctttgaaactcgtcatttcttccagtagaggataggggtaaatgttgaccctgataatctttccctgaacaagcatgtcgtaaacttgttccttgggataaaatccttccaatccttctcctgacaggtaaatggactggatatcctgttcgtttggataggaaggactgccgtatttgaaatgaagctttttcgccaaaatcatagtgggacaattttacatggatgattccaggcagtctccatgaaaacgtattgcgcaatacatgcccgtaacgaaagcatgtctccaatcggcgtcaggcattattattggcagtgggcacacttggcctattcccatcaaatccatataggacgaaccaggctttcatatggaagcatttttatgtcccatgccttgaataattggagtctatttttctattcgattgacaataaacgatccatattcttctcatatccattttgtgtaaaaaacatgccctggacagcggtcttgggagaaggattccaaactccgtatgggactatccagactccggcatcgtcaaattacacgggactcacctattcatcaaaaatgaagccatatgtccttattgtcaaaatatctccattcttcttattgagccaaaaaactggcagacagctgtcttggagtacatgatcccaaatccgtatgggataaaccagactccattatgggcaaatttccttgggtatgtatcaggtatacggggaaaaaattccttctccatttattttatatatacattgtatgagaccattttttgtataatggaattgttatcagcatattatgaaaacagaggcttatttttagcccaaagaagcagaaggagacagtaactgacttattctgaataactccccgaatcatttgtaagaattagcggaatgctccccttgttataataccggatgggtacccggaaatgttttcaatgcttccaagggttatgaaaattgtttgtccgtttagtaaccgtatttcctgaaaggtttgccaagtaggaacgcacggtactttgcccagccgatttcaccaccttgctttgtcagaaagtttttatcctgtaatgcccttccatcatcttccgctatgttgagatctttgagtctacgcctaatctggcagtaatagacatatttcgttttgtcggtaagttcagcgcaccagtcaaagaactccttccccctatagagtaataggtcttcaggaacacccggcttcttcttctcatacatggcgtttcgttccctcagttcctgcagccattcatcccaggttcttttgtgcttgttcaaggaaggccttccctttttattctccctgtatttgataggtccttctttcaggtaattattgatccaacggtagactgtcgcaggtcttacccccagtttccttgatatgtcagggactggggttttccttttatagaggattacagctttcctgcggagttgttcccgttcttccgctgaaatcttcctggcgtcctgttttgttgcaggaacgaattgccgtcttcttttcctcattttgtcggaaatattcataaagcatcagaataaattcatcaacaataattctataacacgtttattattaaagaaatgaaaattataaaattctcataatattagaatacatcatattaaaaaggccattcagatgatgaaggcctatgttaaaaaaacatacatcaaataaaataaacaaaatcggtgcaaccacccgtgttgcaaaaaccatcatcaataactccaaccttatcgatgccaaacaaatggcagagaaaattggcttgctgaaaaaggatatcaagcaagtaagggaacaaaactggcttgcctccttctttcctgtttcagcaagaagccaacatccagacggtcctcttttcaaaaaatacgtctacttcaccattcctgtaaacaaggtcaaacaagatctctacaagatggttttcaatcctgatatcaaggatggttcgctcaataaaaagaccagggcaaaaatcacccctgtatttgaagaggcgttaaccaaccttggtatcgaggcaatcagggttccttcctacgttttgaaaatgaacaacaccagttccattttcaaagctgaaatcaatgctccggcgttcgcactcatcattgaaaacgccaggaagaaaaagccaaccggtaagacagccttcatttctgaaattgccggcaagcgtttccataatgcatatagtaaaaatgacgagcatccacgggtttacaacatgttcactcagatgccttcatccatcaggcagcatgtattcaaaaacatctatggagtagacatggtggaaatagacctgaccaattcaattgtccaatgccttgcctcccatggcaaatgcacaaagatacttgaatcgatcaaaaccaatacccttcttcctgaagatcaagacctgagggaggaaaccaaggagaaactcctgacatggatcttctccctggtgtctgacaatgtaacaaacaggtggatcaccagatgcaaaaaccaattgagggaattcctcaccgatgactacttcgaggaaatggaatccttcatccaggcaattgacaatctggactccccccataccctattccactatgagaatgtcctcagggagttctgcaaacaacaccccgtctgcatcagtctccatgacgccgtgttcatcccggcaaatcgggcagatttgatcaaaaatctaacctccctgttagatagtcaaaaatacttctacaagattaaccctctgtagttttcgaaaaaatcacatcagccggtttcctccaattactgggggaaaccgattgttttcatatcttccctataaaatggaaatgattggttttcaataagttatgcaaacacattaatttctaatacattgaagcttaatgaattagctgtaaataacttatgatcaatgagtcgaggcttcgaatccctccctgtccgccatcaattttccgccgcaatgtattcgtaatgaatatgttacggtttttgtttataagggagtggggaagaaatggggaaatatcggttttataggaatgctcgacttgacatcatattgctaataattgtagagttcaaaagatgattatacaccatgctagaacttgtattcatctctttgctggccgtggcaggatatcttttggctaacatgtggctggatggaaagagccattgctgtcgagaagtgtcctattacttttgaaactttacagtacaatcagaaaatagtatagaaaataagtatggattttaagttcttgagaaaatcaaatattttctaagtttatagcaaatttttttctttaaaatagaaagttaactaaaataaaatatgaagcaggatgaaaaaatattacattcggaagaagaaaaacacactgcgatgggaagcattgcaggttatgtcttccagttttacttttttctatataagttgctcacaatggaacatggctcgatagtgtcgttcgaaaaactcgacgatactgcgactgaaaaagatcaagccatcaccttttttcaagtcaaacatacagttcaacaagcggcattagaaggaaaagatagggctctgacaaatagagcttctgatttatggaaggcgttagatgtatggagaaagctcatcactgtgaaaaatgggaatatacgttctgaggaagaacagaaagtatatattgatacacataattttgtgatagtttgcaacaaaaattatcaaaataataaattggctaatctttgtaataaaattagaatagagggaatatcaaatgatgaaatagataaagtttttgatgagataactggtgaagcaaaaaataacagaaccaagaacaatggagatagaattgcccaaaagcctgctgtccaggttcagatagatgctctccgggattttaaataccgtgcagattttttatccaaagttgagttcaagtctttgaatttcgataatattagagaggaatgtcttaatcatattcgtaataatttgcgatttccagaaaatcaaaaacaagatgtttttgatgattttatgttagaagtgatgaaggattttacggaatgcaccaaagttggcaaacctctttcgtatgattatgacaaacagttaaatcggtttgaagaagtttttaaaaataaacgtacagaaagtcttgattttcgagtaaaaacagaatcttttaaaaaggagtttcttgatttggtttgcatacgtcaactcgctaaggtagatgatataaaactaaatgatttggataaaatagcaaaatattctagttatttctttagttttaagaatagattcaatgaacttaatgataattttaaaataacagaaccagaatctattaatttttgtgaagaagtgaacgccgtctgggataatcatttttcctctgtatataccgatgtggacgaacatgcagaagagcaggagatcagcagaagagctaggatgttattaaaagagattcgtagctttaaagtaaccctatgcaaagagcaattatcgattccaatctccaatggagcattctattatttctctgacgaatgtaaaataggttggcaccgtgaatgggaaaaatttatttaagaaaaatcattaataatatggacagaatatctcataacgaaggacttgtaatatgctctgttctgcattcacttgtggataacattatggatgtggcgcgactcgacctaataattgtactgagtgtcgatcgagctatacgcaaacgtgttcgacgctacaactcatatcaagaatttattaatagtgagtcaaggtttgaacaggcattgaaccgcaaatttcaggaatttcaaccaatcattatcaatgcaataaccatgatgcaaatgactggcattattgaaaatggaaaagacactatgattgatataactataaaaggtagacagatagctgaaaatgcacgtgatatccctggactggttgcagaagaagtaaagcagtctgttattcaactcaacaaattaatagacggaattgataccgaaacattatataaagatttaaagattgtattatgaacttttatatttcaaaaataaaactgtggtttcgtaatggagaagagcctcgaatttttgaatttctccgtgacaaagtaaacgtcattacgggtgactcatcaacaggtaagtcatccatactgaagattattgattactgtctattagcagatcactgtacaattgttcaggatatcatcaacgaaaatgtttcgtggtatggcttggtatttttcgttgatgacagattgcacacatccattcgcaaggctcctacattagaacaatcggaaatgtgtgttatcttcagagaaggagaattcctacctgatactgaaccagaggcaaacctaaacgacatacgttcaaaggcaatggttaggatgaatgagctgttcaatatacctgccaaatttaaactagacagtaaagtagtgctgaatttttcggcataatctgatgttcaactatctcacagaggatattattgcaacagaaagcacataccaagatcttcgctttttccgaaatcgtgattttggaagaatactagatgatctctttaaaatggcaatcggtgttaatgaagccaaaattcgagagctagaaggagaattggaaaaagtaaaaaacacgacggctagaaagcgtaaagcacaagaaaagcaatataaactggtagaggcatatgagcagaatagagagaaaataatggaagagatggtaagtttggatctctgtgatgcatctgaattagggagtacaccagaggaatggtctcagattatgaaaacaactgtggataattataacgttcaattctccgatgtaagaaaagagaacagacgtaagcaattgaatgaagaattgagacagttacgtgaaaaccttggctactttatgtctttgaaagcagagtgcgaaggatatatgaaacgcctaaaacgacaaggtgacagtcttgtgccaatagaatttattgagaagcacatgtctgaaatttttccggtattatgaaacaagccagttactaagtaaactccaagaagcatggaaggctatacgtgacaattatactccagagcccaagttacctgataatttcgaaaaacgaatgcaagagttgcaaaagaagatagacgcaaagacatgtgagtctaagcgacttaatccaatgcaacccgaaaagaagaatatacaatggattcgctctgttatcctattgtctgagaaaattaagaatgaactgaagaaagaacctactatcaccataacagatgaagacattatcaagctacaagaagtcgaaacggttattgatgagaagcttaggaaattacagacgcgaaacgacaatgcgataggtgaattgaactaccatatcaatagatatttccgttatcaaaatggcctatcagagtcatataacgattgcaaaccagtttatagtatgggagaacatgttttgatgctggaacgcgatgggactgagtatcctattgcaaacgtgggcagcaagtctaactatatgtttttgcacctgtgctacttttttggtctgcatgagttgttggctaaaaataacaataaacagatacctcggtttctctttatcgaccaaccaagtatcccgtattatgccgatcgtaaggatggtgacgaccaagaattgcgtggtggtgatgagataaaacttctatccgccttccgattaatagacaggtttatgcaggagatgatgcgtgacaataggcatttccagattattctaattgagcatgcggatccaagatattgggaagaccaaaatgaactgcaatcattcaaaacatgctatcagtttagaaataatgagggacttattccttctaacgcaatcaaaaaatgagaacgataattgggaacatatcagccgctgtagtacagcgcgtaggtaataaaagcttgggcgatggcatagctttctcaacagaactatgcccgatggatgatgtagaaattcacctccataaattgattgatacatcgttcaaatacgacgatttgaagcattttgatgcaattgactcagttgagtataactttgtataccgatgcgtatcgaaagtttttacggataataattgcctaattgaacaagctaataacttagctcgacacctctatgaacagagcatacatccaaatgtcaaagaaggtgagttctatgtggtctattttaaggagtgcgaactgaatggcgaggctatggatgccataggactgtttaagtctgagagccgtgaaacaatccttaagatatttattcaagaagataagttacgcttgagtccagaacaaggtatgagtttacgtaaattggacaaaggatgcatcatcttcaatacagatagggagaacggctataaggtggcagttgtggacaataccaattctagaagtgatgctcgttactgggtagacaactttctgcatatagctaactgcaacgatgactatcacaaaacgctccaggcggtgaacatgtgtaccaccttcattcgtcaaacacagaaggatgatgatggcctgacatgtgccaagactgccaaggcggccacaattcttctgtcttctgaacaatctgtaactctgaagcaagtggcagatattctttgcccaacagatgaacagaagcaacaattcgatactttcaaaacacaatttgaggaaactcatggaactttgcccaatgagtttacccctgtatctacagcattgaaacgcaagcctgtgaatcgtatgaatactataaagcttggaaccgattttgaggtaaagatactcaattccaatgcagaggttgagatcggctgtgaccagagcaaaggcatgaagttctttaagctgtattatagacatggtaaatagttctgactaattcttgaagcacgcagcaagtgcgccaaaatgctagaagtaatcaaagccaacaccctatcctaatcattagattcaatccatctctcccacccctccaccttccttctacaatctatttcctcctgttcctttctccattccaatcctctatgtattctccaacctcatgggaatcatctccactgggattgtagtcccaaagtctgttccaatcaggatttttttcttctgaatcactgtccataactgactgttcttgctctcaatccctctagggggctttctatactctctacagtatttcctctatatcctgaataattttcataggaataattttagaattaattgcttggagttattttaattaaaaatgtcttcgtacaaaactgattgaccttggaagtcctggaatccggtcatacgtaatcatacatttagaactctcctatccattatctccatacattgagtgagatcgtttttctcataacttatttgtttccatgttcttgtgaattctgtggaatttccggggaaacaatacatggaatacggcggtatacatttgaaaactctccttttatttttaatatacattgtatgagaccatatttttcataaattgctcattacaatatatttgtaaattttaagtgcgtttttataagccttcattactctccattactccattgtatatgatcatttgggagaatccatgttttagaaaatgctgatagtagtatatggggaatcatctatacacaggttattttattctgaatacccccagaattgattgtatggatttttcaatgtcttcccttaccaattaccttctttcccgaataatttccgtagaaatcaatttagaattaattgacctgtattccttggattctaagaagtggagctggattgaatgaccacaaggaaatgcttaattgaaaacggcttcgtacaaaaattttcatggagaaattgtgctgagtttccgctcaattgtacgcagtattccttgtcggtggagggtaatttattctgaatggctccaggatcatttgtaaggacttcaaaggaatgatgggtagaacatccgcaaatctgaaaaattaccgcaaaaaataattttgccttacattggggcaaatggactttctcctttttcctgttgatacatttcctaatggagaaaaaatttttccatttttcggaaaaacaattttgaagcgtttgagaaagtacccccttcatatggaagcttatccatatatgttaaggaagaatgaagataggctttcaattgggggagtgcgtttggtttggtggaggtatgctgtcgtatgctatggcgtaccttatattcggcatagggggatgcagtaatatccccctatgcctattattgtttttctgttcagaaatcgttcctgtttttgttgatgttcatggtctcttcgtggcgttttgtttcatgtatatgccagatagctaataggcccgtgataaattctaaccggctcgtctgatccatttttcttgcaggatagaagtgcaggccttcatcggaagcaacagcgatattaatatccgaaaagttactctctcctccgttttgtacaaaagaaatcttgggagcagtatcaccattttcttccgaaatccttactgatgggttatttgttaaataagaggctgtttgtttttgaataaaccaataaggtctttctcctgaggcaagtcctttaatccatttgttgaccatttttctatgttgttcgcgcaaaccagcagatttctgttgtatcgcaataagcttatcccatttttgtgcactttgttggcgatgatattttgctgcatcgataaatccatagttttgcatcacccttgccgcgttgtcgtgtcctacaatattaccttccactatctcattaaagtagccttctatcagttgtttatcagattcgttcaactgttctacggttattggaataaactgaagagaaatcaaccttttttccaaattcattgatggcgtatctgaattccatccatttgcccacacccaaccgaatttcattttcaaaattgtcttatccccgaataattctgttgagccatacaaatccgaatggcccacttcattttctaggatatctttatcataattgttctggatctggactgccttgctctgcactgcattagtattcagtacttcattgagagacattccaaaggagatgtctttgaagacgcggctcttgggtttcacttgcctattcttccagtcatcatttggttcaagaattttgaaaatattttcaggaccagcttctttctcgagggttttcctccacgtcccattctcaatgttggaattgaacaacaggaagttcagcagatcgtttttcttcagttccagtttttcgagaaacgaatcatgaacgaattgaggaagtttgctcctgaatattcccagaatttccttcacttcttcgggttggcaacttagggtagcataaaagtaatataacatcttgctattcatattcccctgcttaagggctagaaaaaaagctgctggatatccttgattatcagcggcgtccccggtaatccgattcctgggttatttccatggaagtcaccgactctggatcaaatgacagcccttcatccggcacgggtacgtccagaatcttttgaatgcacgtctcaatgaatgaagcgctattatccaatttgcccaacaagtctatatccattgttgcccttgcctgtggaacattccagacgagcagcataagcgctcctttgaggacaaaactatgttgaaattaagattgtcccagacggtacaggaatctctccatcgcatagtactgaacgatttcctggaaattccgtccgcttttccgagacaggttgtaaagcttgtctcttattgaagcggccttgttggcgggatgttccttgctcatatgagtgtttccagataaggcatgatcgttcgggtaactccgcgaagagcggcatattcatgaatgaggggaagattgacgggatgattattcgcgtacattttgagggcttccagaaacacatccattccgaccctgttcctgaaacggaacacgtccaccagagtcttttccatattgtagactttcagaggcactccttgcatgtcatgtgtttcaatgcccgcttcataaatggcatcacgaaaccggaatgtgtgcacgagtggataggaagacctgggagcattcccctggtaaggaatggcaatatcaaccgcatggggaatttgtgtcgtcatgtcatggaatgaaagcgccgacacaaggcagataaccgcagcaggatatctcctggcaaccatgagcatttccggctcgtaaggcaggcttttatcgttaagacagtaaaagccgcgtccccatctttggataatccccatctccatatatttctgcagcattcttgcggtcatcagcgcaggaagaagttccccccgccggacaactccgcctttgcttcggaaaaattctttgactggagtaggaatagtcatggatcaaaagtacacacttacatttgggatgtgtgcacttttagaacatttgtgagaacatgacaagtcgaaagcatgatctcacctggaaccatgcaggaaggagttattgaccagaggtagaggaagatatacgggggaagacgagaaagaaaatggttttccccaagaaccaagaagcatttgtaatgaataacttacataatgtcaccccaaaagcatccattttcagtccagtgaattcgctgttaaccacttataatcaataattcgaggcttcgaatccctccctgtccgccattaattttccaccgcaatgtattcgtaatgagtatattgcggtttttgtttacagggaaatggggaagaaatgggagaaaaacggagtatctctatatttccttcttgaagttctataaggtatcgtcatagtagtcatactacaagaatgaaaatggaattcaaaaaattcattagaaagtactcttctgaaatattggagggaaatgctgctatattcgctggagctggactttctatatcttgtggtatgtcttcttggaaagaactcttgaaagatatcgcagaagaactggagttagatattaatcgagaaaatgatttattatcaatcgcacagttttatcacaacaaaaaaggaggaagaggagaaataaatcaacaacttatcaaagcatttaagaaaaaagttacattgtctgataaccatcgaatcttagcatcattacctatttctacatattggacgacgaattacgatcatttaatagaacaatctttagaagatgaaggtaaaatcgttgacataaagaaaaaagcagaaaaatttggcacaatcaataccacatagggatgttgttatttataaaatgcatggtgatatagataacccaagtgaagctgttttgttaaaagatgattatgaaatgtatcatcggaaaaatgcattattcacaactaccttaaaaagtgacttattatctaaaacatttcttttcataggatttagttttgatgatcctaatttatcttatattttaagcaaaatcagaattttactagaaaaagatgcgagaccacattattgtatattccgttccgttagtagagatgattttgaggacgaggaaatttttcacgtatgaaaaaatacgtcaagaattacgtatggatgatcttaaaaggtatggaatacgacctattcttattgacaaatttgaacaaattaaggatatattgtttcatataaaaacaaaggttctatcaaaaagtatatttatttccggcgcggcagaaaaatacgatcccatgcattctgatgatgcaaataaatttgtatttgaaatagcaaaaaggttagcggcaacaggtaataaaatagtctctggatttggtttaggtgttggtagcagtgtcataaatggagttttgtcacatgtgtattcctccacggggagattattagatcatcatattgttttaagaccatttcctcaaaatatagaggatatagatgagagaaaagaaaaatggtctcgttatcgcgaagatatgatttcacaagcaggtattgctatatttttatttgggaataaaaagcaaggaagaaaaactatattatctgatggtatgcgagaagaatttgagatagccaaaaagcataaattaaccataatacctgtagccgcaactggtaatatggcaaaagagatatgggctgacatttcatctaatttaggcgaatattacccatctcaagaattgcagagcgctattatcattttaaatcagttagttcttgatcaagcagaagggttagtaactgcaataatcaaagcagtcgaagaaacacaaaaattatagattttatgacaaaaaaaatattcatatcctacaaatataaagatgacgatgtagaaccttttgcagaattaaatacaacaactgcacgagactatgtagataagcttcagaatattcttgaagattatgataatattaataaaggagaagaagatggagaagatttatcatctctgtccgaaacggtaattgaaaataagttaaaaactcgtttgtatgatagttcaatcactatcgttctaatttcaaaaaatatgaaagaagtatatttacaagaaaaacaacaatggattccatgggaaatatcttattctttaaaagaaataacaagaggagggaggacaagccaaactaatgctttaataggaatagttttacctgatgcgtatgggagttatgatcacgctattattgcaaaagagtgtcaaaattgtaaatgtaatatctggcaaacaaataacctatttaaaataattggaaaaaatacatttaatttaaaaaagaaagacgatcacctcaaagattgttctaacaagaataatgtatatactggccaggtatcttatatggatttgatacgttgggaggtattcataaaggactcgcaacattatattgaagaagctatacaaagaaaaaataatatttccaattatgatataactaaagaattgcaatagaataaactacatggttaatcttcttgccgaataaacataaaaagagtagcaagaagaaaatgaaagcagaatcaacaatcatgcaccagcgcctcgaggcgttcaaactggccgaagaacttggacaaatggctcaggcactacacaactacgagcgtccccatcagggataccgcaacatggggagacgcccaacagaaacaattgaattcttcaaaaaatcacaacaaattatgcttgaagaaggttaactatacaacttgcatttgagtgggccatacttccgtttttgactctgcaattgttgttcttggtgataccgccacgcgtgattacattccactaaatccaagacgactgtcattcaccttaaccagtttgactaatacgttggaaataaaacttgactttgttaatcattcagctaatttaaagaagaatatatttttattttgaaatatgcaatcgctaaaaaacaataaatattttatcgttacaaaataaaaataaaacttagtaaatatcattattttaaattatactacttcattaaaatgaaatctccacattgtgataagactgtttatacagaaaaccctattaaaaaattaaactatatcacacgcgaaaaaattgaagagtcattaaaaaatgatactatatggaatttatttagcgagagaaaatttggtgaaacaatgtttaaccaaagattcaacttttttgtattatccttttcaattatagttagctcaattgttcttatatgtacatcagaaaatcaactttttatatttatcaagccaatagttgtggtaggatttatttttgtattgttgtttggtctttctttatataaatcatttttacacgttagaatttacgtaagaatgatacaagaacatactcaagaagataattctattttcaatctaatagcaaaagaattcaaaacttattccccttggaaaaggaaaaatttccgttttagaactcatggggaaatttattcctggattttgtatatttacatcattaattgcaatgattgtgatattaatgtatttttgatgtataatatgtttcggaattatctactttaattcaggagttcaacgcgatttcaacgaactctttcttagcattctaggaggtatagttaaccttcttcaagtatagtttgttgtggttttttgaagaattcaattgtttctgttgggcgtctccccatgttgcggtatccctgatggggacgctcgtagttgtgtagtgcctgagccatttgtccaagttcttcggccagtttgaacgcctcgaggcgctggtgcatgattgttgattctgctttcattttcttcttgctactctttttatgtttattcggcaagaagattaacgacatgcaagcagattgaagtgggtttgttgaaaagtgcaatcatcgagattagaatgatcgaccagtaagataatctttcttcctatctgacccacctgaaggtctgtacttgtacttccgtttaaatctgaacgtatctgatcccgacgtgacgataatgatcgggattcccgaataactctattcacttattccggtgagatcggttttaggtttcgggtatcctttaccagcaatccatttttttgtttcagctaccatttcgggagtgacggtgaaatcgtaattagcatagtcgccgacatggaattgtccggttttgaagaatccccatttttcgaagaagtcggtcagatcggtttttgtgacgtcgcagcatgctctgatgaattcgaactggtacttgatggtgtcattcccgccgtaatttcccgcgttgttgcgcagatattccatcacgtcagggtagaagtcgggatgtccgttttcggtaaagtagagatggagctgccatagggggaccagcttgttgaagacatcctttgattgcaggtagacgatttttccgtcgatgatttccttgcgcgccttgtcgtagctgccctggcgcttcaaacggctttcgttgcctgttttggcggcggcttgcaatgagaagatattgttgctgacttccgtcatgccgccccaggtcatcgggcgcatttgcatcacgtggccgacttcgtgggagaagccccagcaggcgtcgcctttgaggacgttttcaggatcggtcaccattcgcatcgtaccattgtctcccaggtaggctactccatcaccgtcgcggaacatgtagtagttgaagttcacgcgggcaaagacgcggtttttcgggattttgccgtatttctcaaggcccatcagatggtattggatgcctatcagcttgtcgtaggcgtggatgagttcagtgccgcggtccctggtgaattttttcaggaattcgacggggtaagcaacctggatgtattttccccgggcgtccatgatcggggagacggcctggtcaagcaggcgtacccaatctgtgttggtgtcgccccgggtagtgtcgaagtagccgttggccttgcccgtcacgaaatggacagggattttcggcgccgtgtcggcatcattgctgaagtagctgatgtaggcgttggcgggcgtttctacatcaatgatgttgattccttccttgaggggaatctgttttttgtgcagtccccagccgttgggatccttagtcggctgtactccttcggccggcttgcgcatcaggttcgggagcaggaggctgatttcacgcccatccgtcttgccgaccagaatgacatgctggcccttctcgagatagacgcccgtcatgttgtcgtatttgctgaatccctctccgattctgaggtttttgcccgtctggcgcggtgaggggagggcctggtattcggcatacaggtagtccggcttgtagttgcctgccaggattttgcccgcgagttccttcatcgcgtcagactggaaggcggaaatgtctttaacctcctgcttcaaagccgtgcaggaggcatccttgaatagctggaggtcgttgccgatgctttccggagtgttggccgcaaatacggatgcgagcgacaacaggggcagggtgaggaatgaaatgattcggttcatgataacgtgggagtgggtgattctacgatgttacaagttacattctccgttttcctcttctttcaccatttctctttttaccggcaaacgaaaaaatcaacctgcttcaacggaagacggggcgggttgatgaatgggaacgctctcacgttgtatagctggttttctttgcgtatggcgtgttttttaaagcttccatgttttactcaattgccttcccatactacggtagtcctatgagggcgtttgcgactgtaacccttgagccatttgattgagtccttctgaaattcttcgacatcggcatagaatttctaccacgcgcctcccctcaatattctcttcctgtcatccgtcagaatggcttttatgtgccatccgtgttgctgatagaagaacagcacgttgttgttcaggatgagggctgcctgatcgaggcgtttctccatgtagagaaagcggaggcaacggatccataggtttctatgagcatttacaggtagattctgcctgtgtttttgggtttgcccgcacagagagagtccggcacagccgggaaccttgctttccacagccattccttgaagcaaagtcgctcttttcggaaggatgggagctgttttgagttgcttgacttgagtgaactccttttccagtttcagaaaccatttcctgcggtttcccgggtgcgggtttccactgcgagaggcattaaagttatagaaatgatcggcttctcaccctcctttaagagtcttattcttgaacggagaggcttcgatactgttttaacaggagagtagcctccaaccgtttttccaattccagcttctgatgaaagggtccttcatttttcaaatcaggttattgtttttgagggctaacaagcttctttgggtcaaggctacctattttgcgctactggctattgttacggctattgcctccatttacctgggcgagtttgttccgtttgatatttttcaaaagatcggggccgatacggtcgatacaattttgaacatcctggcttcaagcatgctggcggttacgactttttccttaaccacggttgtttccgcttatgcggcggcgacgtcgagcgtgacgcccagggctacaaagctgctgatggaggattccacggcccagaatgctctttccacgttcatcggttccttcattttcagcctgattgcgattattttcctgaattccggcatgtatgaccagcggggaagggtggtgctatttgttgtcacgctgggggtgattgccattattctggtcacgcttatccggtggattgagcatttgtccaggcttggccgggtgggagagacttcggagctggtggagggagtaacggaaagggcattgctggaacgcgcccgggaaccctatctgggcgccaatcccctcgttgacagggagcttgatattccggaaaatgccgttcccgtcaggagtgatcagacaggcaatattcaatatattgatattgaaaagctggatcatctttccagggatagagatcttgatctttacgtcgtctcgctcccgggggatttcgtgtccgttacctcggttctggtttatgctgacaagcctgtgtcaaatgaaacccggcgtgatttgcttggagcgtttatcatcggccatgagcgcaattttgaacaggaccccaggttcggactgtgcgtgcttgccgagattgctgccagggccctgtctgcggccgtcaatgattacggaacgggtattgatattattaaccggggcgtgcggctgctgacgaagtatgcccaggaagaacgccgtcccggcgtgaagcacgagaggatatgggtgcctccgttgaccgtctccaatttgttttcggatattttcagccctattctgcgcgacgaaggagggattatggcgattgacatcaagttgttgaaggcttttgccgcattgcatggcctggataacgggcagttcaaggaggaagcccgcaagtattcccgccaatgctatgaacatgcatccagaacggtagtgctggatgaagataaggaagtcctgaaaaaactggtcattgattagcttgcttgtcttcacagtgaaaaagagaggttttagaggtccaggtatggttgaatgggctgaatcttattaacggtccacagttttccggatggcccaggttgcaaaaaggcgttattttccgggagaatccatgggagagaaatcatcatggtaaaacggatggttgcccggaatttccatgttcatcaatagggcaactacggaggtcatgtccgttgagtaatattcaacattttcatgtaaagtgtttttgggcaggaggaagtttcattcattccccggttattttcttcagcatgttgaattttcgataggtaccggaccgtacatgaccatgattcagcgtattgtcatgaaggtaagcacatgttttcgtaccggagttcttttttgcctgttgatggctggcagcccttatggtttggcggagaaacccgttttaacggactggaattacttgctgtcctatgggcagtcgctttccgtagggtggacggccaagccggtggtgacgacggagcagaagaacggcaatttgatgttcaagggcggcgtccgcccttttgagaccggtaatgaccggagcgccgtgattcccctggtagaaggcgtttcacctgacggcgccaggggagagacgcccgtttccggcgctgccgggaatttggtgcgcctgctgaaaaagcgcgcctccggtaaggcgtccaacgtccggtttctgtgctctgctgacggagtgggaggtgtcagcatcggcgttctttccaaaggcaaggctccctaccagcgcattctggatgatttgacggcggggcgcgagctcgcctccaaggccggcaagtcattttccatgccgtgtttcctgtggacgcagggggaaaccgaccagcaggacaggaaaaccggggaatggtacaaggagaagatgcgcgcgctgattcaggatattgacgcggacgccaaggccgtcaccggacaaaagaatgacgtgctgtgcttcgggtaccaggtttcttcccacctcaattattttgcccagaatccgacggattatcccgcgattgccgtggcccagctggatctggccctggagaaggacagccggtacatcatgaccacgcctatgtatcatttcacctatagcgacggggtgcatttgaccgctcccatgtcccggctttacggggagtatgccggatacgtcatgtacaaggtgctggtggagggcgtgcattggaagcccatccatcccgtcgcccatgcagttggcaggaaggggaaggattggacggtagacgtgaagtttttcgtgcccgtgcctccgctggcgctggataccaagacgatccttgatccgggcaattacggcttttccctggtgaacgcgcagggcgaccccctggagattaagtccgtcacgctgaacggcagagacgccgtccgcatcataatgtcgtccgacccttccggcagccatctccggtacggaatgaccttgaaggagaagcttccttccggcccgcgcaccggggcgcgcggatgcctgcgggattcccagggggagaaggtaaagacccggattcaggacgtcgtttaccgcatggacaattggtgtccgtttttcgactatcccctggaaccccggaacggaatgaacaaaaaggagtccaggtagattcccatgaatgggagcgattttttccgttttattttctcaggacgccgtttagataaggacaatgatgaattccgtatccaggttttttctgccaaatcgggtgaactgtagaatatttcttcctgcgcccgtttgaatggtgaagaagggcgtatgcatggcaggtggcaatgaaaattggaaggtgcggttattgcagtttcattgcaatcacgcaatttcctgaaggttggctaaaaagaatatgtcattccggctgttgccgtccatgtacagcatcgatcgaccatggggctgtttttgatggcatgatccaggaagaatacttgcaagccaagaacggctgtccatgatcgggagaccttgcgggctacgtccagagaaaggtagggagaataactggaatcgggatggtaggaaggaaggttcgtttttgcggcttcacgggcggaaattccataataataacgcgtaagcttctggctttcatagtggattcctgcccccgcagctatgaaccagggaccatgcagaatggggtattggtgtgagaagtcccaactgcttccgtcattgtagcccagggcgtccctcgccattttaatgctggtttgcccccatttggacaggtacgtataagtcacatcggcattaagcgtggaatgcctgggattcagctctttcagagcgatgtcatctgtttcatccgaatcaaagtacagataagaataggatacgccgattgccagttgatggtgctcattcttgtatgcgtatagtcctgcattcacatcgtggaggtagaagtagggattttcagcattcagaagtggtatggggtagatatagttcctatgttgcctgtaaggagatgcggcaaaaaaagttcccagtccggtactgaattcggaaatgcatggttggggagaggattgccgctgaccgcatggagcaagaacttcggtaaagtggggttcatgatagaaggatgtctctgtgcaatcgtttccttcaacacaggagacgagcagggagaggataaaaacaggaagttttctcctgctctggaatggagttgttttcttcatcggattaagacgattgaattgttcggactgtaaatacataatttgtaccgttagtatgaatattgtacttttggtgtggctgaagtcaatggaaaataattcagggcctcggagaggggaaaaataggtacgggagaaacatgcctctgctcgccagacggccaatgcggtgttgacttgagcaggggctgctttataacataaggcgaaaatggcccggtccagaaaagagaatcttgcagcgtttcaccgcaataccatccttgaagctgcgaatgccctttttttaaaaaaagggattgcaggggggacgatggatgaaattgcaaaggaggccggatatagcaaatcgacggtatacgtctatttcaggagcaaggatgatattgtggatcaccttgtttatgaaggaatgggccatttattgcagagattggagcaggccgacacggaagccgttaattttaaggatttctttttaaaggcatgttgggccgtttcaaaaatccatgacgattttccagtatactttgaaggtattacaggccggatcagtttggaatcagatggcgttgagcggcaaattgatacgggagaaaccattctccagcgtatttaccggaggggagaagagataaatgccctggtccggtcacgcgtccagcgggctgtagatcatggggaattgccctcgttagatgatctttcagaaagaaatatggtgatatggttctttctggcaggtgttgtagagaagagttcccaaaaagagaattatattaataatcttttgaaaataaacaggaaacaatttcttgaatacagctttgacatgttatttcgtttgctggaatgactttcaaaaaaggcgtttttccaccaaaaagcggttttgttttcttctctccgaactgaaaaaatgcttccaggcagaagcttctgcgccctttttactcaaaaaatagggatgcgaagctcaaggttttgtttccggggctgtcaataaacacatcagctcccgaggcgatttttccgcataaacagatcccgttgccgccaaaagttgtttttgctgtgggggcggaaaccatgtctcttgaagttttctttggagtgcagagagaggcattcttttagattattcatgttgcaagagttacaatcagattaataaaatagtcgatgggctgcatcctgcttgggaaaggaacggttttggaaaggctggtcttaagatcaagatgcgtcattgccgttgtatatggaatccgtacagggtacagtgttcagcatgatgaataccatgttcaagtttttgatgggtgcggtgtgcgccgcagttctgcctgccttcggacagggggagaagacggattttcccacggacaaggcggtgaccgtattcagcgccggggaagggaatccttatgcgtccatccgcattcccgccttgctcaatatcgggaaggggcagcttttggcgtttgccgaaggccggtataagaatactgaccagggggagaacgacattatcatgagcgtcagcaagaatggcggaaaaacctggtcacgcccccgggcgatcgccaagtcgcatggggccacgtttaacaatccgtgcccggtttatgatgccaagaccaagactgtgaccgtcgtattccagcgttatcccgccggggtcaaggagaggcagcccaatattccccagggctgggatgacgagaagtgcatccgcaatttcatgatccagagcaggaatggcggttcctcctggacgaagccggaggatatcacgaagacgaccaagcgccccaccggcgtggacatcatggcttccggcccgaatgcgggaacccagttgaagagcggcccccacaaggggcgcctggtgattccgatgaatgaagggccgttcggcaaatgggtgatttcctgcatttacagcgacgacggcggcaaaagctggaagcaaggccagccgaccgccaatatgaagggcctggtgaatgaaacgtccatcgcggagacggataacggaggcgtggtcatggtcgcgcgccactggggcggaggcaattgccgccgcatcgtgtggtcacaggacggcggtgagacatggggtgaagtggaagatgctccggaattgttttgcgacagcacgcagaattccctgatgacttattctctgacggaccagcctgcctttggcggcaagagccgcctcctgttttccggccccagtgccggacggcgtatcaagggacaggtggcgatgagctatgacaacggcaaaacctggccggtgaaaaaactgttgggagaaggcggttttgcctattccagcctcgccatggtagaacccggtgtcgtgggtgtgctttatgaggagaatcaggcgaacatcaagaagttgaagttcgttcccgtgaccattgagtggttgactgacggaaaggatacgggcctgccttccggcaagaaacccccggtatccaagtagagttttattgggagggaggctatttcattcccccttctgcgcgctgttctggctggtccaagcttccttcatagtagctcaagttattggttaatgtccaaagccattccagccagcagaagtttctcctgaaatggtgcaaggacacccgtacggggttgaatctatggcatcattgatatctggccgacagggcggtcaggcagcagaagagggagaaaaagtggcgcaaaaccggttactattaaaaacctcttgcaacaatgaattgagggcatgcaaattttccggttcccggcagaggaacaggattttttgctttggaatttccaggtatgacaaggtgcggatggtttgtcggcttgattccggggaggacgcagttaccctgcaaggcatccgttgcccttggagctcttcccattcgggagggccggcaaacggaagatgattccccgtttcaatatatgtcctggatttatctggtgttggccggtctctgtgagatcggatggcctctgggcttcaagctttcacaggcgcccggcacgggttccggcaggtttgccgcctgcattgcgttctccgtgttcagcatggccctgagcggttttcttctgtggctggcccagcgcagcattcccatcggcaccgcttatgcggtgtggacgggcatcggcgcgctgggaacgtttctggtgggcatcctatggttcggggattcctccaatgtctggcgcatgctggcggccaccttcctgctgataggcattatcgggttgaagctggcccccgggcattgagcttccctgtagggcaattcatgccggggcgccggagaaggtcagcgtgcagcagccctccggaagggttcaacggtgggaaatatctttttcccacactgttccgcaggcgtcggaaggcatgcgccagtctcctcgcggagaaagggcaatcgtgcctaccttggggccgtccggcatgcagctgcgcttgaattgctgccggaagaagcggcggatgaagatgcccaggcagcggcggatgaagtccggctggaattcgccgcggaaggcgtgctccgtcagatacaggattttgtccggctctgccccgtatttgatgaaatggaagaggaaaaagtcatgcaggtcgtaaggccccagcacgtcttccgtacgctgttcaatggagccgtcgcctgacggaggcagaagctccgggctgacgggggtattgttgatgtccgcgagggtggaggccagttccggagacgattctccggcgatgtgttcaatgaggcaccgtatcagcgtcttcggaatggagcagttgaccgcgtacatggacatgtggtctccgttgtaggtgctccagcccagggcgatttccgacaggtctcccgttcccacgaccagccccccggttttattggccaggtccatcaggatttgcgtgcgttcgcgggcctggacgttttcataggtagtggtgcgttcggcggggtcgtgccctatgtcgccgaagtgccggaggcagcattcggaaatggggatttcccgaagctccgcgcccagaaggcggcacatggttacggcattgtcgtgggttctgtccgtggtgccgaagcccggcatcgtgacggccagaatgtcggaggcggggcgcttcaacgcccggcaggcgcgctcgcaaataagcagggccagcgtggagtccagaccgccggagatgccgatgacaagccgccgtgcatcggtgtgctccattcttttagccagtcccgctgtctggatggcgatgatttcttcgcaccgttccgggcggtgtgcgggggagggcaggaagggccgcgccggattaaaggcgtattccagaccggggggggcgggaacttccgccggcagcgtcagatgaagggcatttccggcaggggaaagggatttgctgtcattgaaggaactttcggagaggcgcgccgccgccagccgttcaaagtccacgtccgcaaggatgagggaactttccctgccgaaccgttcgccttccgccgccagcctgccgttgtccgcaatgagggaatgcccgccgaatacggtgtccgtggtggattcatgcacgcctgcggaggaaaggacataggcgcaaaggcacctgccgctctgctgcttgaccagttccctcctgtatgcggccttgcccgtgagttccgttcccgcggaggggttgaatatggccctggctccctgaagggccagtccggagctggggggaatgacgctccacaggtcttcgcatatttccacgccgaagctgaaggaggaggctgcatcgtggaagatgatttccgttccgaacggaatatatgccccattgactttggcctccttcgtccctgttcccagctccctgccggaggtaaactgccgtttttcgtaaaattcccggtagttggggagcacggttttggggaccagcgccagcactctgccggactggatgaccgccgccgtgttgtacagggcatcttcatgcaggaagggcaggcccgccacggcaatggtgcctgagctttccgtggcttccgcaaagcggcgcaggccgtccagggccgcctcccgcaggcgcggctggaagaagaggtctccgcaggagtagcccgtgatgctcagctccggaaagacgacggcagcagctttctgttccgcagccttccggaatccgtccatgagctggtcgacgttgtaatccacatcagccacgcggagctgggggacggcggaggcaagtctgtaatatccgaacatgggcggcgcagtctggaaaatggagcccgcagatggtcgttttcccgtaatcaggacgcaatccgggagaagcgggcctgatccggatactaaaagctcgtgaaagacttgtaaagccatcagtggggactgcatcccgcccgtctgccgggaggatgaggaagcggcaggaaaaggtattccacccggctgccttcaacgggccgggcggcgggagcggctcttatgcctttttcctgaaatcctgcgatgcggcggcttttcatgttccgggaacagcattgaagctggaaaaacgggagaaaaggagtaaaccatctcacaaagcccgatgaataatactgaccgatttaccggaaaagccggggcctacgttcagggcaggcccggttatcccgccgccgttgttgagcttctgacgcgggaaacccgccgggagaatccccgaatggcggatataggttccggaacaggcatcctgtcccgcgccatgctggagcatggctggaccgtgtacggcgtggagcctaacgatgacatgcggagggaggcggagaaggtgctgaagggtttccaccgctttcattccgtgccgggaacggcggagcatactctgcttcccggcgcttccgtggacctggtaacggcggcgcaggcgttccactggtttgacgccgccgcgttcaaacgggaatgccgccgtattctggccgcggagggcagaatagccctgatctggaattccagggtggaagacggccccattgtccgggaggaagggaacatccatcgtctttactgcccgcgtttttatggattcagcgggggcctggccgacttgacggatagaatcggcgagtttttcgaccaccgcttccgggtattccgctttccgaatgatctgtcctatacgcgggaccagtatctccgccgcatgatgtccgcctcctatgccctgacggaaaaggatgagggccattccccctggctggacgcccttaacgggctgtttgaccggtttgaaacgggaggccgtgttacggttccgaatgaaaccgtggtgtatttaggggcctgctgaggacgcaccgttcatgcactgcatccggaaaaggatgttcacgcgttcctttgccggttgtttccttggcctccatccagtgcgatgttcttccggcagaagcccggaaccgcaacggcccttctgccggaatatcccggaaatgtccggcaatgaaaaaaggaaagctttctttcagttcatggattgaaagatgatggcggcaaggacggcgatgattgccagaacaacaatgatggtgggaatatagcgggttttgttcacgtcaagagtccactccctgttgaggcgggaaagattctcccctgccgcgtagcgggagaaaaggtcatggagctgggagtaatccagggctttgggagccatgtaaagttccctgttcttcccgttgaggaacgagatttcgcaatgatagttttccggaccgttgcatgtggcctggaagaactcgtctccgcggctgcagatgatgaaggcctccgtatcgtttttgatgccggaaagggctttctcctgtgtttcgcagggatctccggagagctcccagacgatgggaggaagggatgaatgaaggatcataatagaaacggtagaggaagatttctcctgcccccagtataaaagaacttcccgcttcattcttgagaagagaacggacccttgcatgatgctccggagggtgatgagcgctctggcggggtacggcattcaacgattgtctttccgcgccaattccgggcctgaatgtttcttccgggcacgtgtcgtccggatttctacggccccgcattgatatttgcttttccgactccggaaaaatcatcccgggatgcagacatggcttcttctctcacgttattcttgctttatcccggcggccctgccgtgctatgatagctcaccgccatgacgcagcagcctttttcccaagaaccttttatggtttccggattgcatggggaccagattctgggcgcccgcagcaatcagcaggattccttttccatcctggccggggatgacgccctggtgctggtcctggcggacggcatggggggctataccggaggggagctggccagccgcgcggctatagaaggtttttcccaggcgtttgagcgggaaaaccggtctcccggcaagaggatgaaagacgcagtgaccgccgccaatgaacaggtgcgtacggtccggaagaagagggggaaggatgacgagatgggcacgacgctggtagcggcctggatagggccggaaggtctgcgctgggtcagcgtgggagattcccttctgctgctcatccgggaggaaaaaatgtttctgcttaatgacctgcaccagtattccgcggagctggaacgcatggcggatgaaggttccatcagccgggaggaggccttgagccatccttcccgccattccctgacctccgccctgatggggagggaagtgcctttggtggatctgcgggaagagtgcttccctctggttcccggggaccgccttctggtcgccagcgacggagtggggccttatctggactccctgggcccggcggggatgcggtacttgtccatgctgtccgcggaggaattggtgcggtccgtgctggaaggcatcaaccgtgacggcgcgcccaaccaggataacgccacgctgatctgtgcggaaatagcggaagcgtgattctccggaggcggtgtggctgaaaaggggccggaaacaggcgctggttgaatttcacatccctcctccggcccggacggataattaaatgccccgcatgcaggagacgcatgcggggcattccttttaaatggctggagccatccgcgttcaggaatgatattcctggagggagcggggggataccttcacatgctgggcggaacggatgccctccaccgtggctctggcggcggcgatggtggtcatgtacggaatcttcttctggatggactgcatgcggatgaaggagtcgtcaatcatgctggtgcggtccaccggagtattgatgatcaggtcaatctgcttgttggtgatcatgtcgcccaggttcgggcggccttcatgcagcttgttgaccacttccgtttccacgccctggccgcgcaggtattccgcggtgcctccggtggagacgatcttgaagcccagggagatgaggtcccgggcgatggattcaatgaacttcttgtcgcggtcggaaacggttacgagcaccttgccggaggtgggcaggatgcagcctgcggcttcctgggccttgtagtaggccatgccgaagttgtccgcaatgcccatgacttcacccgtggcgcgcatttccggtcccaggacggggtccacttccgggaacatgttgaacgggaagacggcttccttcacgccgataaagcggcaggcgcgcggcttcagccccaggtccttgagcttcttgcccagcatgatttccgtggcgtggcgcgccatggaaatgcccgtcaccttggagacgatgggcaccgtgcgggaggcgcggggattggcttcaatgatgtacacctcgtcatcgcagatggcgaactgcacgttcaggatgcccttcacctggaaatccttggcgatcttggcggcgtgttcctcaatggtgcggacgtgcttgggggcgatcgtcacgggaggaatggcgcaggcggagtctccagaatggatgcccgccagttcaatgtgttccatgaccgtggctacaaaggtgtccgtgccgtcggccagcgcgtccacttccgcttcaatggcgttgtccaggaagcggtcgatcagcatggggtattccgggctgacctggatggcctccacgccgtagcgcttcaggttttcttcatcgtaaatgacttccatgcctcggccgcccagcacgaaggaggggcgcaccatcaccgggtagccgatccgtcggcccagttccacggcttcctccagggaacgggcggtgccgctttccggctggcggatgttcagggcgatcatgcgttcgcggaaatattctcggtcttccgccaggcggatgccttccggctgggtgcccatgatcttcacgccggcatccttgagggcctgggcgatgttgagcggggtctggccgccgaactggacgatgacgccttccggcttttccttctcgtaaatagccagcacgtcttccacggtcacgggttcaaagtacagcttgttggccgtgtcaaagtccgtggagaccgtttccgggttgcagttcaccatgatggattcatacccgttgtcgcgcagggtgaaggcggcgtgcacgcaggtatagtcaaactcgatgccctggccgatgcggttgggaccgccgcccaggatcatgatcttcttcttgtcgttcacgggcacttcatccttcgcgccgctgtaggtggaatagtagtattccgcgtgttccacgccgctgacgggcacgatgcggtaggtggccgtgatgccgttttcctggcggcgggtgcggacggccttttcaggcacgtcgaaaatctgggccaggtacttgtcggagaagcccatcttcttggcctggagcagggtttccgcgggaagggaattccaggcctgcccgtccagggagaagtcaaagtccgcaagctccttcatttgttcaatgaagtagggagtgatgcgggtcagcttcacgatttcctccacagtcacgccgcggcgcaggagttcgtaaatctggaagaagcgttcgctgttgccgtacgtgatcttttcacgcagttccggcgtagtgagggcttccagcttcttcacgcggcccaggccggcgcggccgatttccagggagcgcacggccttctggaaggcttccttgaagttctggccgatgctcatcacttcacccacggccttcatctgggtgcccagcttgtcggaggccttcgggaacttttcaaaggcccagcgggagaatttgacgactacgtagtcgccgtaaggctcgtatttttccagggaacccttgcgccagtagggcagctcgtccatcgtgatgccggaggccagcttggtggatacggaggcgatggggaagccggtggccttggaggccagggcggaggagcgggacgtgcggggattgatttcaatgacgatgatgcggttgtcctcccggttgtgcgcgaactgcacgttcgtgccgcccgtgacgccgatggcgtccagaatgcggtaggagtagtcctgaagcctgtcctgcacgtcctgcggaacggtcagcatgggggccacgcagaagctgtccccggtgtgcacgcccatgggatccacgttttcaatgaagcagacggtgatcttctggcccttggcgtcgcgcacgacttccagttccagttcttcccaccccagcacgcattcctccaccagcacctggttgatcagggaggcggccaggccgcggggaaccacctggcgcagctcctccacgttgtacacgatgccgccgcccgtgccgcccatggtataggcggggcgcagcaccacggggtagcccagctcggcggccaccttttccgcttcctccacggaatagatgggttcggacttggccaccggcacgccgatcttgtccatggtctccttgaaaatgatgcggtcttcaccgcgggcgatggcttccaggtccacgccgatgacttccacgttgtactgcttcaggatgccttcctcattcagcttggaggccaggttcagggccgtctggccgccgaggttgggcagcagggcatccgggcgttccttctcaatcacggccgtgatgcggtccacggtcaggggctcaatgtaggtgtggtccgccatgccggggtccgtcatgatggtggcggggttggagttcaccagaacgacgtcgtagccttcagcgcgcagggccttgcaggcctgggtgccggagtagtcgaactcgcaggcctggccgatgatgatggggcctgagccgatgatgaggattttgcggatgtcttcgcgttttgccatggtatgatgcctctatgtggtccgtggtggttaaaaataaataccggaaacaaggtccgcccaaggtgcgttgcctctccgctccgcatacccggcgcgtgacctgacgcacagtaagggacgttctgcgataagtccagacaaaacaacaggaattccggggaaaaggctatggtcttcttccctttccgtacagcgctgcgcgcgcaatccgcccttgatattttccgccgcccgtataccctgtggggcaaggatgaggaatgccctgatattgatttgctgccttgggctgctgtggccggcagccgtgacggcggcggaacgcgcccccgcaggccggggtgcggccatgactccgggtgaggccgcctggtaccagtccctgcgcgccggactttcccaattccggaagggcggaggctacaaaaccaacagggaagccatggaagccctggcgcagaaaacctgccgctgggacccccgcacgcgccgtcccgtcttccttctccgggaggccaccccttccttctgctcctccgcctgctacctgctccttttaaaatccctgcaaatatgggacgccgcccagccgcagcccgttatttccgagcgagcgtggctggccctcattccccgcctgggccagcatgacggcgaagggccgtggggctgggcgaacgccaacggtcccggcctggccgtgctggtgcacaggctgggagccggcgtcaactttgaagactggcggaaggcccgtcccggagacttcatgaaaatattctggacggaccacatcggccgccgggaatccggccacctgaccgttctggtgaaggacggcggggacacggtcaccttctggtcctccaacatgccggacggctacggagccaagacagtgcccaaatcccaaatcaggcgcgtcatcttcacgcgcatcaccaggccggagcggttcaacctggctacggcggtaggaagccatccgtggctctcctccctgctccggcaggaggtgggcatcaaggaggtgcgcagatactcaggcatgcagaacccgtgacctcctcccgccgtgaagaaatgctccttccctccctccgtcacgccggaatgctccgtgctggtgctcggctccctgccgggggatgaatccctgcggcaggcccagtattacgcccatccgcgcaacgccttctggaaaatcatgggaaccctgctggattttgatccctccttgccgtatggggaacgcctgtccctgctcaaccggggcggggtggggctgtgggacgtggtggcctccggcgtcaggcccggcagcctggaccagcacatctcccaggaacagcccaatgacattgccgccctgctggaatgtttccccggcatcggcaccgtctgctgcaacggcaccgcctcccataaatacctcaagcggtattttccggaactattcctccgggaaacccctgccatcatccagatgccctccaccagcccggcggcggcgcggctgacgtatgagcagaaattccgcgcctatgaggaagtcatcctctcccgactccggcagggagggaaaaaaggctgagcttccgcgccttacttgccgtctaattccctggaggttttggcccccgcttctttcaggatgcgcgccaggctgctctttccggtggcgatggcgcggtccaggggagtggccccgcccctggagcggaaattcacgtccgccttgtgctcaatcaacaatttggcggcggcgtttatggaattttcctgaaggccggaaacgtccgcgagcacccacagggccgtttccgaattggccggcttgtaatggcctagccgcggcttgccgttgggtttgttggggtccgcaccgttttccagcaggaacctgacactctcctcattcccgtacctggcggcggaaatcagcagggttttgccgtcattgcacacgtaatccgggtccgctccgtgctccagcagataggctgcctgcggagccctgggattgaaataatgcctggaaagaagggaggaagaggcgtttttatactcgtcggaccggcctatttccagattgacgtccgccccgttggcaatcaggaggtccgccaattcaaaaaactgcatgtccagcgccagggccagcgcgcaggaattatcccccctgatgccctccccctggtaattcacgtccgccccggcgcggatgaaagcgctgactttggaaagctccggcttcgttccctcttccggcagcttgtcatacttcctcttgccgttgatggtgacagaggtggttgtgctctcccgcgcggtcctgtaatccttcagcttgtacaggtattcatacaattccagccccttcttctcccgggtggcgcggtcggcggaggggtccacgggcagcggagcctttttgggaatcaggcgcagggagcgttccgccgtgcggtgcccctgcctggccgccttggaaaaccagaatttggcctgggagggactgcgcttgacgccgtctcccttcaggaagcagaggcccagacggtactgggattccgcattcccttcctttgcttccaggtagatgcgcctcccttcttccggggtgacggcgcggacggcgggcgaacagccgaggaagacggcggctgacaacagcagacgggagtagtaggtcatagtggggtaggggaggtgagggagtcttcattcaggaagacccgacggcggccagcaggtggacgtccagcgccagggcttcatgaatgttgaaattcaaatcgtcgcggagcctgttaagggcttccatgcgcttcagcaattcgttcacgggcatctgcgcggccagcgtgcgcacctccggatgaatcggcgtgacctccggagcgccggaggcgatcagggccgcctggccgaaccagctgatgagcaattccagggcctggttgcgctgttccaggtattccgtctctatctgggcggtgttcgcgtccttgttgcgggactcccagtcggaggtatccgtgccctgggcggcttccttcgcttcatccttcagggcctggttcaggtttttggtgatggcggccttggcctccgtcatgacgtccacgaacttgctgcggaaggccagcgcggccaggtcattgtccagattgcggcaggtctccagccagtggggcagcagggcctcctggatgggggtgagcctgaactccgcggattgcagcaggttgacgcgcacgcagcgggaaataatggtctggagaagctggtccggctgggaggtggacagaatgagcaggcactggctgggcggctcctccagggttttcaggaaggcgttggcggcctcgtcattcatgcgctccgcatccatgaacacggctatcttccattttccctccgccgcgcgctgctggaggaaaggttccaccgcgcggatgtcatcccgcaggatgcggcgcgacttggacttggggcgcaccaggcggcaatactcgtcccgcacgccgtccaggtggtccgcccggatgccgttcatcagctccagcaattgaaggatcaggcgggaggctccctggtgctcgtctcccacaatgagcagggcatggggaagccggttgcgggagaaggcggtgcggagcaggtcgaacgcttgggatgccgtgaatgccatacgctccctatgaaaacatttcgttgcgtcagggcaacagaaaagattggtatatgtcggatatttcatgtactaagggggccggttatggaacaaaacgacatctcatcccggattgtctttgccgaccgcggcaaggtgaatgtggaaaaaggcgtggaattcgcccccaaatttgaccagaacggcctgattccggccctcgccatggaccacgttacccatgaaccgctgatgctggcctacatgaacgcggaatccctgcgcatgaccatggagctgggggaagccgtttactactcccgcagccgccaggaaatctggcacaagggcgcgaccagcggccacgtgcagaaggtgaagcaaatcctgattgactgtgaccaggatgccctgatcgtgctggtggaccagtgcggcgccggagcctgccacaccgggcaccactcctgcttctaccgttccgtgcccttcggcgacgagctgaaggcccagccccagggagaacccgtcacgctgcgtgaagcggacggcggcgtcgtttttgatgctgaagccgtatacggcaagggacactaactcttttttgcgcgtcaatctgcgttcaccgggttgacgcgccctctttttctgctgtaaagtcatgaatgtgaaaaagctgcttgtcatgatggccgccgtctccggaacgctggtgctgtgccagtgctcttcggaagcgcccccgccccctggaaccgtccgcatggtggaccagcaggcgattgccctgatgcaggaagccagggcgaaggaagcgaaaaacgacctctccggcgcgatcaagaaatacaggcgcgtggtggaaaagcaccctctttccagggaggcgccgcaggcccggttcaggatggcggaactctatgaggcccgcaaggaacccgcggatgcgtttgaccagtaccagaagctcattgaccgccacccggacagccccctgtacaaacaggccatggcgcggcagaaggaaatggccttcggcgcggcgagcggcgcgttgaccaaccgcgtactgtggatgtttgacgtccggatggaccccaagaacgttacggaatggctgaaccacgtgcgtgacaacgccccgtacgcccctaccgccccgcaggcaatgaacgtgctgggcagctacctggccgcccgcggccagatgaaggaggccattgaggcgtatcagaacctggtggacaaccatccgcactctccgctggcccccacggcccagctccagatagccaccctgtaccgccaggccgccgcggacggcgaccgcaaccacgtcaatgtggcccgcgcacaggaagcgtatgaagactacctccagcgctaccccaacagcgcccgcgccggagccgcccgctccgacctggccgccatgaagcgtgagctggtggcccagcagctggaagtggcggaatactacctgaccaagatgaaagacaccgatgcggccatcttctgctaccaggaagtggcctccaagggcagcgtcaatcccgccgccgccgccaaggcgaaggcacgcctgaaaaaactgggcgtcaccagcagataacaggaactctacgtccgcatgaaccgtatccggaacgccttcaaacttcttctgcccgttctgtgcctgctggccggttcctgtggttaccagctcggcggcaccaagccgcccaagctggaatttgcgcagaccgtcaaggtgtgcctctttgccaacaactccctggaaccccgcgccgccacgctggtgaccggcgcgctggcggatgaactgcagcgggacggcacctaccggctcagcaccggtgcggatgcggatatccgggtggaaggagaagtgtattccatcaccttcgaccagttgcgttccagccgggaagacacctacaaaagtacggagctgggcctgcgcctggccgtcaagtaccgggtggtggacgccagaacgcagaaagtcctgtatgccagctctgcggaggaagtgggccaattctttgacctgggcaacatccagacggcccgaaccaacgccctctcctatgcggcgcggctggtagccacctccattgcggaaaccctcaccaacggctagacctgtccggctccggaaaatttgtgcttatggcggaagtggaatacagcgtttacttcgttccggtgccgatcggcaatcgggcggatgtcaccctgcgggcgctggacgtgctgcgcaaggtggacgtcattgcgtgtgaagacacccgccattccgggcttctgctctcccactatgaaatccgcaagcccctgatgagcatgcacgaccacaacgagcaatcccgcgctggggaaattgccgcccgtgccgccggcggggaaagctttgccgtgatcagtgatgcgggcatgccgggcgtgagtgatccgggctaccgcctcattcagacgctcaaggaaaaggaagtaagcttcaccgtgcttcccggaccgtctgccgtggtgacggccctggtggggtccggactgcctacggacgctttcttcttcggcggctttctgcccgtcaaatccggcaggaagggctccatgctccaggcggcggtggaagcttcccataccagtatcttttatgaatcaccccaccgcatcgtcaaaaccgtgcaggcgctggcggcgctggacccggacgttcccgtctgcgtagccagggaactgaccaaaacctttgaaacctaccaccgcggcccggcttcccggctggcggcggaatttgcggaacgtgcccccaagggggaaatcgtgctgctggtgggcggcgtaaatgcgccgcgggccgtcaattaatgagccaaaggcattaataacgcaccgtcaccttgaccgggcggtggtcggaagcggcaggctcttcaatcaccctgcgttccgccaccttgaacgcctccgcctttctccccctgtacatccagatgtaatcaatgcattccgccggttgatcggcagggaacgttttttgggaaaaatcgctcagcggaatgaaatgcttcttcatccgggctatcggttccgagcctggcgtcaaattaaaatctcccgcaatgaaaaagggcttcctgcactctgcggccagagcggcaatcatgtcgatggaagcgttgctatcctcccgcgtcagggacaaatgcgtgacgcaaaaacagtaatccttgaactcggccatcagcagcacgcgcgcctcctcccggccgggcaaaggaattcgcgtcacactcaaaggcttctccctggataaaaggccgactccataggaaccgcccgaataatcaatggccttggcgtacgtccccgtcaactttgtccttacggccaattcctgcaaagtgtccctgccgccgctcctttttgtcttgctgtccagttcctgaagggccgcgacatccggttttgcctccgcaatcacccgcgccgtacggtcataatcccgcttgccgtccatgcctgtaccgttctttacgttgtaactcatgaacgtggcttccccgccccacagggaaaaaggagacagaagaaccgccgcggctgcgcatggactgaaaatgaccggattcatacctgcaaaaatgaaatttagggcctgttgttccgaacggcccggattacagataatacgcatgcctttcccccgtttcttgcagagcttctttccttcctccgggtgagtaaatcccgtggatgggcgaatcaacaacacatctcccgctccgggaaatttcctcatccggtttccggacacccgccttttataccctttccgccccatactgccggaaaatgacgcaggtcttatcaacttgacgtctggaagtgtgtcatgatagtattctatcatcatgctggaggataggagatcacgttcctcgcgcaagacaccggatttggtgactgatgagcttattatcattcttcatgaagcgggcatgctggaattcaatgacatcttccagcgtaccgttatcgtgatgaagcaaaagcacatgtccctgggcggtgaggaaattctgcggctgcggatttatgaaaagctccagggcctcgtgagcgccggcggcctagtgaaaaaaggccgcgaatacacagcccagcctaagctgattacattgaaatcggaaacgttcccggacacccgcctgtagtggtgtttattttttgaggcctattatcgaagcaaataatttttggataggatgctggaccaatttctataaatatttccggagagaaacgtggaaaggctgggatagggggtattaatggatgagtttcatttaattgagggagaaataccgcagtagcgatacatttccatgggagagatgtctgttttcaggagagaacctagccatttatttattcctatggatgaagcgtttgcaaaggcctccggtttagtaattcgggtgaataggacatgcctaatggttgatttgggaacacttttaattccgtaacccggttttccccctggattggattggttggaagcccagaaggtgactacgtcttctgtttgagtcaggtaaatagtgagatgaccgcgttcatgagcacctattttttctgtccaccataatttcatgatatcaccgggctgcgcaagattccactgagtaaagttgtatccagcttttaatgcgtataccaacacagcaaggcccgggccattggcatttgcatgaccccaaggggctacaccatctgcaactcttctgggtagaagagcttgccatgccttcctgtccagaacaggacgatcgtggatggaatcccatatatttagcgctaggagcaatgctccataaacagcggaagagcagaaggaaggccgggccttttctggtctcatgaggatgccttttgcttcatcccaatgaaatgcctggatgaagttgttcagggcatatctcgaacaggcgtatccgccgcctgtttccaactttgtcatggctttggccaggcaggagctccatgttttttcctgttcagtgaaatgggcgagaacagactcattctgcggtgtgctccctgtggaggcagccgtggcaagaagcaacaggaagaaagccgaagtagaagatctagaaagaagatgcatggaagagtcagggttaagggactgaaaggtgggtattcagataaagaaattcactagctatgtttgctatcaattgaaactttacaaattccctcctatggtaggctcctccttcttttgtaactagaaaaaatttagctacttatgatcagtttattatgaagggtaatcaactgatgtgctggtgttcccctagatgtagaagggctaagttcttcgtctagaatctttaagccgtttttggtggtatttcgttttggttggtagagtagaactttttcaaacaagacgctttctcgtgtatcaatccttctgcatgcggcgaatttaatgaactattctgtcaatcctgcaaagagcaggaatacagtaatgaagatcataattctcgtgcagagagccttaacggtttaagcggagattgcggtagttcggggtagtgtccgggggcgttttgctgttgagaacttcattccactggacgatctgtccggagggggaagtctgccacatttccttggtatagccttgaagggttttacctgactgattagaacatttgtaaaaataaattatctctattgagttgccggaataggcaacttttagcaactgataggaacgagttggatatttatcccaaaatttacgaatatcgttcatgataaactcgttagtggatgctttgccgtttgcgtactggtaattgcacacgggagcgaaaaatttgggcaaggtgcacaatgtctccagtttggcgtgctttcaagtaggttgtagctcgctgcaccatttgaacatccatttgagttggatcaggattggggttcggttgttcgatggatttttccccttccgctaaagtttttgttgttggaatattgagctgggtaggttgggattcttggttgatttctttcactttagcttgaatggaatcatatgtcttccttgctgcttccagttttgacaaagtagagaaatactcttgctggattgcttctacttcttttttccttgcctcaagaatctttccgagcttcatttcatcctcggtggctttagaaatggcttccgcagtttgttgaactggttcatatgtcttctgaagaaggtttgttttattcgtaagggtgaggattttgcttttcaggtaatcagtttctttgaggagtttttcatttttggtgtggtaataccagctaacgcctatacccgagatcaagataatagaggtaataatgatgacaaagatagaagtaaccgttgaatcccggcggtgggttgacggaaaggcaggttttggaaaaaatgaagaaataggcttttcttctggagatagtactgcgatgggttcattcgaattctctacaggttttagttgccagtcttgagatgtctgttgaatgccgtcatcacaggaatttttgtcctgtggaggaagaagagtccaaccgtctggaagttgatcgttagagttcatgaaggtgaaaggaaagatggtttggtaagagaaaatactgtatttgggaattctacggaatgtatgtcggactatattcggctaccagatgaaattatcattaaccgtcttttgtttattcgaggttttcgtcagcggcagaggctttttgcatacttgttttagctaatctttccggcctctgtaacatatttccgatatgttggaggacggttaccgtatatttgctccaccctgtttattacattgtttatcatcttccagcataaggacatcttttatgttagaactccttttcttgcaggaaaccaataatacatggagatgggtgttattagtttccggaagatgatatgtgaaataatgagagcgttattgctgtttattttggagaatggcgcttcttataagggaagaggcttgttccactttttcctgatctactttgatgccttcaataagactggcataaaactggacgcaatagagtggatctcctccagccctgaatccaatatagaagtttttctttaggaaatacgagatccccagccagatggagacaatcaggaacaaaagggctaccgggcctgcaaccagcacccctaatgtaccaagaaagaaacacacacctgcgaaaactagattccagaagtttttcttaagtccacactcgacggtattcacttgattgagaggggcgcacacggaagtaaatccggacagactggaggaacggtagtccaagcagtgccgattggcaataagggaggattttggtgtgattcctaccatattaagaatccagctaaacactcctgcaggacgggaggagatgcgcagaaatgtggttttggccgggtcgatttcaaattcctttaatacatatttggacataatattttgttgtgttaatgtttggtatgatagagaaatagtggaatgagcgaatgttattcctcaacgataaaactggggattgccgaggaactggtggaactactattcccgggagggtctacggtgaattcaggtacacctttactctttattaaagatgtgtcaggactggatatccctgtttttcctgttgttgtattcttgcggatggtacgaccgtttttcttggttaggtggaaagagaacgagcctcctcgaaggtaagagcgctgatcattggatgcatgccattttcctttgatattgtaacgatttctcgagatattccctctatacgcgatagtagtacctccggagccgctcatggaagccatttttgcgctgagataggattgtcccaaagatgtgagattaaagtgaatttgccgaccgctaatttttcctccaatgcttccgcaggagaatggttccgtggtcccggacgatggaatgctcaattttccagaaatggttccgtcttggtattccttcaagttcaattcacgtgtttggctactggtcgtgccagtgacggttccacggtaggtgtattccgctacgatgggagaacaggaaactgtcgttaagattaataacaatattgaagtaatatgaggtaattttgttttcataacttgaatggatttaaaaaattaaatgagaaggttccttccaatttgtcggtaatactctgtcaaaagttgcgtgaattaaagtatctttgatgttttcccttgcctcaacgatgccttctcgaatatccagaaattgctttgcggtacttttctggcaaggtatagatgaaaagatctgaattgccatatatgttgcagaaatgtttttagatcatgggattaatgaatattattttttataaaaatgactattgtggagattaggactaactgaatcatcgttcagaattcccatactattcattttctgagattttagaatgactgttgaatttgataagcctcctacgcgtggatattttctttcaatccatggaactgaatttgttggttgtggtcaagttaaaattggccattattattcaagatgtccggcagtgcgttccattatgaagaatacacaaaaataatcatattttatttaatgtaaataaaatatgcgcgcaaaaatatgttttttaataattgaaagaagcaaatctatcaaataaaaatcactaataataagtattttacataatattttaaatcgaggagcatgatttgaaataatttatttatatttttgaataattgtttttaaaattagattcgcttctaaatcaagaaaaaataatcaatagagtaactttaaaggaaatcaaacaagttattcctccgctcagtcaacttgaatgagttttactgtatcaaaaatggccgcccctgaatggaggcggccatacattgacgggatgatgccgtccggcagtttagaaattggtgcggaaggcaatgttgtagctccagccggtgaagcctttctgcttgctggcgtccgtgccgttggaatgggcgtattcaacgcccgccatgatcttggccatgttcgggttgcattcgaaaatgtagtagttgacgcccaggtacagggcctgcatgcagtcggaagtgccggaataggtggagttctgcgtatagcgcttttcccatttcacggcgttgctgcccgctgccatctggtagcggaccacgccttcccagttgggggtgaatttgtaggacggcatgatggtcacgccgaagacgttttcagcccctgccttcatgccaatgacgttgaagccggccatcacttccgtcatcagggagaaatccccctgggagccttcccaggtcagcgctaccacgtccttggcgccggtgccctggtatttggatttgaagccgtagccggtgagcttttcatacgccttgttttgtgcgtcgtcgccccagttggtgaagttatgggcgtaatccagccacaggcggctttttttcaggaaaacgtcgttggacgtatcatagctgagcgtgccggtgacgaagcagttgtcccgggagttgaaggcgggttcaatgcggttgttgaacgtgccggttccggttcctccgttgccgttcatccagatgcccgccgcccagccgagcttgtcattcttgtcggaattgttcacctggaacccgtagttggtttccgagcggagctggttgaccagcatggagcgttcaatggtcaggatggcggaggaggaggtgcggtattccccggtgatgcgcggcttcattttgccgatggcgtaggtgacggggcctcccttgtattccagattcagttcatacagggagtaggtcaggtcggaggtgtcccaggtattggttttcgcgttgtagctttccagaccgtccatgccgccgatgttccagacgttgttgagcttgaagtttttcaggaacttcatgttgaagccggcgcggaagcggcgccattcgtcgttgaagcggcggccgttgccttccttttcacccatcacgcgcccttcgccgttcgggtcaatccagtccagtccgtactgcatgcgcagggaaacgttgaattcctggatgtagggattcttgtgatcccgttccgcattgaaccacttgaaacggtcaccgagccatttgcaggtggaaaagctgtcgcgggccagcagaacgtctccggtggatgccgtggaaggcgtggcggcggcaaaggcggcggctccgagagtcatgatgccgatgacagggagagtataggttttcatttgttttctatggttggtgtgtgtctgtgagaaggtcttccggggaaggttcttcctcacggagacggcttctgtctatcaaaccagccacagggctgtccaaggcttaagggtgacaaaatagccacccgtcccattgaaggttacacggtaatgcggagccatgctttggcggccagggcgtccgcggcggcggccacttccgccttccgcttgctggctccatggccggaaccgatggcgtgtccatgccagaaaacgcgggagtgaaaacggttttcagcgtccctctgccctttttcttccgtttcataggaaggagtttcgggcaggatgtcctgaagaatggcctggagttcccccttggggttgatttccttggggtgggtggccgcggagtccagcgcttcatgaagaacgcgcagggccacggtcttggccgtttcatagtcggagtccagcgacatggccccgaagacggattcaaacgtgttggcgatgatggagttttttccccgtcctccggcccgttcctccccttttcccagggcaatatatttgtccagccccaggatgaagccgtatttgcccagattggcgcggctgacggtgcgggcgcgcagttgggtcagctccccttccggagactggggcatgtggcggtaaaggtactgtgtgacggcaagctgtaaaatggcgtcgcccaggaattccagccgttcatatgtccggcgcgtttccggcttgctgtccgtgctggggtgggtgagggcctgcacgagcaggtccgggtttttgaaacggtaacccagcttgtcttccagcgcggtatagttcatcccggaaatgctagggccgccaattaggaaatgcaactccaaaggaagggtgtttccggcagggcggggcacgccttttccgcgtcatcccagccgctccgcggctttgacatatggctggagaggtgtaggatggtacgcgaacgaacgttagagaccgcgatgaaaaagattgatccaaaggagattcgggataacgccatgcagttgatcgggcacgactggatgctggtgacggctggaacgccggagcatttcaatatgatgacggccagctggggcggcctgggcttcatgtggaagaagcccgtggcattcgtggttatccgtccccagcgccataccttcggcttcattgaggccggggaggagttcacgctttccttcttcagccatgagtaccacaaggcgctgactgtttgcggcaccacgagcggacgggatacggacaaggtggccgcctccggactgacgccgtatgcgacggagaacggcaacgtgagttttacggaagcgcgcctggtgctggaatgccgcaagctttatgcggaggctctcaatccggaagcctttctggacaagaccattgtaccggagtggtacgccgcgcgggatttccacaagatgtacatcgtggagattctgaacgtttgggtgaaggaataacgtgccggaaatgccgccggggtgaattcttgtttatcgtaattccccgcggtttgtttagagcggtttaagcgtggaatcctccagccggaaggatggcagggggcacggggtatcgtgcagccagtccagatgggtggtggtgatgaggctttgcgcgttcgccgggagcgattgcagaaaggccacccggcgcgtggggtccagctccccgaagacgtcgtcaatcaggtggatgggcgtatgccccgtttcttccgtgagcagggaggattgggccagcttcatggagatggcgatggtgcgctgctgcccttcagaggcgaactgtgcggcgctcctgccgttcagcgtgatgtccaggtcgtcccggtgggggccgttctgggtttgcccgtaccggatgtcccggtccacggcggcgcacagccgttcatacaggtccccttcctccgaggcgcggtaggccacggccacctgttcctcccgtccgccgatgctgcggtaggcgagggtgatgtggggagccagcagcgtcagcaggctggcgcgcaggcttttcagttccgtgccgtgcagggccagctggcgcgtgtaggcgtccagctgcagcttgtccctgtgcctgtgcttgagcaggtagttgcgcgttttcagcgccctccggtagctgaacagggccagcctgtagccggggtgccactggctgcccagaaagtccatgtattttctgcgggcgtccgctccggcctgcaccagggaaagatcgtcattccccatccataccaccgggtagctgtcagccagatagctgcgctggtccttgcgcggctctccgttgacgcggaggtccggagcgtccggggtccacaggatgcgccgggcctgccctggcagctctccgcggatgccgaaggcctgctttccgtgagcggccagcgggccgggccgggcggtgcgcggggattgcaggcgcagcaggaagcagacggcttccagcaggctggtttttccctgcgcgttgtttcccaggatgatggccccctgctgcggaatctgccaggagaagcttccgtagcagcggaagtccattaatttcagcctggagatcatggggcaggggaaggagggattattccgcagggagggcgcggatggcgtccatgatcctgtccgtcaaatgctggtacgcctcttttcccctggcgttaagttccgccggagtaaaggggattgggtcccccaccgtgaccgtgacggggtggagtttggggaagcgggcgccgatggggaaggcttcatacgctccgctgatgcgcaggggctgcacgggaaccttcgtcttgctcagaatgaggccgatgccccccatgccgtcgtggatttcaccgtccggagtgcgggaaccttccgggaagacgagcacgcgcttgccggatttcagcaggcggatgacgtgcttgaggctggcggcgtccgggttttcctggtcgatcgggatggccaggcagagcggaagagcccatttgaagatgccctggaacagggtcttgcgggcaaagaaatagatgccgtcctcataggagatgcccagcatgggcgggtccagaaagctctggtggttgctgacgatgagcacggggccgtcttcaatgagcttttcccggttgacgactttccaggaaaagaaggctttggaaatgcttttaaagagcgtgtagaaaacccagtagaaggagttcatctggcggagagtttttgttgaatgttgtcggtaatgaaacggacgacctggtcgatcgtcatgtctgacgtatccaccagcagggcgtccggagcctgggccagcggggcggtggcgcgggaggagtccttgcggtcccgttccgcaatggagtccgtcaggccttccgcggcgcggcgggaggccctcacttcctcggaggcggtgacgaagtacttgaacggagtgtccggaaataccacggtgcctatgtccctgccttccatcaccacgggttcccggcggttgtattcccgctgccgttccaccagcagggagcgcacttccggaatggccgcgatggtggagacgtggtcgttaacctgcgggcgcgtgagttcttcacccagcacgcgttccccgcacaggaccacggagcggctgccgtcctttccgaaggagaggggaacggaggacagcacttccagcacggcggccgtgtccgcagggtcgatgccctgttccagcatgtaccaggtgacggcccggtacatggccccggtgttgatgaacgtgtagccgaggcggtccgcgatgagcttggcgacggtggattttccggatgcggcgggaccgtcaatggcgatggctggatgcatgagtgtcttctatgttggaaatgggggctaaagccgcttggattgtagctttgcgccccgtggaaatcaagactgcgttccggcggcccgtgcaaaaagagtttcactttttcctgtaaatccgttatacagcggggcatggcccaactcaaacacccgaagatggtggacatcagagacattttggacgagaatacgcgccttcccgccctggtggccgcgtccgccgaaaagttgctgggcctggaacgcttgaacaaggcgtacgacaagatcgtgcgcgacaaggaatccggctccccggaaaatttcttccagcttgcttccagacatttgaacctgaagctgcaactgcgcccgggggatctggaaaatatccccaagaaggggccggtggtcgtggtcgccaaccatccgcacggcctgtcggacggcatcatgttcggagagctgctcacccgcgtgagggaggacgtccgcattctggcgaacgaacagctttccctgtgccaggagttggaaccctggctgatcaaggtggacgtgtacgaggatgagaacgccaagcgcaagaatctctccggcatgcgcaagatgatctcctggctgcggaagggcggcgtgctgggcattttccccgccggcacggcctccagcttttccctggcccacaagagggtgacggacgatccctggaacgcgaacatcgccgccatcatccgcatgacgaaggcgacggtggttcccgtgcattttccggggcgcaacagcctgctgttccagggcgtttccctcatcaaccgcaaggcgcgcgtggccttccttccccgtgaagtggggcgtgacgggcgccgtacgcaccgcatcgtggtgggcaagcccattccgttcagccagcttgggcagtatgattccgatgaagccctggtttcccatttgcgcctgcgcacctacctgctgggcaagagttatgaaaagagccgccgtccccatgtgcacaggaaggaccggaaggcgaagatggccgcactgattccgcccgtttccgtgcaggacatgcaggcggagattgatgcgctgcccgcggaatgtctgcatgcccgccaggagaacggagactgggacgtgtacgtggcggacgccctgcaaatccccaatatcctgattgaaatagggcgcttgagggaatacaccttccgccaggtgggggagggctccggcaaggcgtgcgacctggacacgtacgataaccattacaagcacctgttcctgtgggacaggacccaccggaagattgcaggggcctaccgcatgggggagacggacaagatcatcgcccgctacggcgtgaaagggctgtataacggggaatatttctcctttacccccgccgccctgaaggtgctggaccgctccctggaaatgggacgcgcctttatcgtgccggaataccagaaaaggccgctggccctcggcttcatctgggagggcatcggccagttcatggcccgcaaccaccattaccgctacctgttcggcacggtaagcatctcccgtgattacaccaacctttcccgcgccctcatcgtctcctacctgaaggcgcatgaaatggactccgtgctggtgcatgaggtgaaagcctacaatccgccccgcaaggcggacctgaagaggtcggaatcctgcatcctgcccattggcctgacggacgcccaggggctctcccagctcgtggcggacattgaggaggacggcaagggaattcccgtgctgctgcgccagtacctgaagctgaacggaaaaatcctgtccttcagcgtggacaagcatttcggcgatgtgctggactgcctgatcctggtggacattttcaagtctccggaacgttccatcaagcgctacatggggaaggacacgtacgaacagctgctgccctacatgcagcgggagagggaagaggagaaggcggcggaatagttccgcaggcgttttttgccggtttccggtccggtttttcccttatccggctagttgaaatgcctgtagcctgacggaagggcggaggagggttccgtcgtcatttccccgataacggtgaagggcgtttccgggaaatgctccgcggccagccgggcaacccgttcccggtcgccgggacggaacgtgaccagcagctcgtaatcctccccgtctcctgcggcctgcgccgcggtgaagcccgggcgcacgggaaggagttcttcatgaatgcggaatcccagtccggaggccgtggccagccgtggaaggtcggttcccagaccgtcggaaaggtccatcatggcggtggccaagccggaggcggccagtacgccgccctccctgacccgtggaatgaaggaaagatggtgccccgtgggaaagctgccgccgagcacgcccgtgacggcgagcaggtctcccgcgcgcgccgtgctgcgcaggacggctttcccttccgcaacctctccggtgagggccacgctgatgatgaggccgtcttccggcaggccggagctttcccctccggcaatgctgatgccgaattgccgtgccagccatcccattccccggtaaattccttccacctgggagacggggcggtccgcatgcacgaacagggtcaccagcgcgtgaagcggtgtgccgcccatggccgctatgtctgagacggccctagccagcgccttcctgccgatcagttcgggatccgttccaggcaggaagtgcatgccttccaccacgcagtccgttttcaggagcaattgacggtttccggagctccgggccacggcgcaatcgtcccccggtcccgtgaccagggaggcgttggagggcatcaggggcaggagccgggccaccagcgcgtcctcccccgtctgccggatggtgggatcaggttccatagggaaggagaacgccgggatacaggatgttgatgagggtggcggtgttaaaaatgcagtgggcgatgatgggcgtccagatggagcccgtgtattcgtacagcagcaccagcatggccccgaagattgccagcggaatgaagggcaccaggctgacgtggatgatgccgaagagcagggacgtggtgaccagcgcaaaccaggcgcccgtgtactttttcatgattgggtacaggtagccgcggaagatgagttcctccaccagcggggccgcgatggcggcgctgaagcagatgaccacaaccaggggaatatcgctggaatgccgcagcacggagacgatggactgctccgccggagcatgcgtgacctgttcaatccactggaacaggcccgccctgtccagcaggaagtggatgaccagcaccagcaggtagcccgccacgggggcataaagaagggctttcagggaatgttttttcagccccagcgcctccattctgcccgtgtggaacatgcgcaccagcaggacgaaggccaggatgaggttcaggcaggtgccgttgaaaatcttgtagccgtccagctccatgtttgtagtggtgggcggagcggaggctcccggaggcgtggccgcagccatcagggcgcccaggctgaagtacaggacgatgatgccgcacatggcgatgtccagcatgtccagatggtccacggggatgtgccatttcagggggcgctggatgttcggcgcatgggcctggcggaagatgcccaccgccacggcgatgaacatgacggcaatcagggcggaggagaacagggtaataagctggtccgttaattcattcatgaaacaggtatgcgtggaataggccgcccttccggagcgccacgccggaataaggacacctgtttctttagtgaaaacacggtgattttccagcagaaagtgagctatcgccccgtactccgcaaaaaaaatcatgaaggaagggaatgaatacttttcaaagaaaagcgggtatgctaggtttccaacggattattgccatgaatattcaacccaaaatcacgcctgtgctggatcccggcttcgtgccggccgttctttggaatcaagcctttgaggccaaagccgccgccgatcccgcttctcatcaagtggacatcgctctgacccgcaatgacggaacctgcttccgctggtccggcaagctccttccccacaccggagaaaacgttgccctgaatgagacctatgtggaacgcatcgtgaaattcctgctgtggcagaagggcggcaatatcatcctcgtcgccggggatgacgccattgcggacatgctggcctcccgttactgcaagggcggcgcccgcgaattcgactgggatttcatcggcaagaagatttacggctcccccattgaagtgaagaaggtgtccgtggaagaactgcctgaggaatattccggctccatgaccctgggccgcaacctggacggctaccgcatcggcttcgacctgggcggttccgaccgcaagtgcgccgccgtggtgaacggagaagtggtgtattccgaagaagtggtctgggacccctatttccagaaggatccccagtaccacattgaaggcatccaggactccctggaacgcgccgcagcccaccttccgcgggtggacgccatcggcggttcctccgccggcgtcatcatcaacagcgaggtgcgcacctcctccctgttccgcggcgtcagccaggaagacattgaaaagaccctcggcaaggtgttccgcaccctccagaaggaaaagtggaacaacatcccctttgaagtggtgaacgacggtgaagtcaccgccctcgccggagccatgggcatgaacgacaacgccgtgctcggcgtagccatgggcacatccgaagccgccggctacgtggacccggaaggccacatcaagccctggctgaatgaactggccttcgctcccgtggattactcggaagaaggcggcgtggacgaatggtccaaggacatgggcgtaggcgccctctacttctcccagcaggccgtagcccgtctggctccccgcgccggcttccagtttgaaggcatgcccttcccggaacagctcaaaaaggttcaggccgccatggcggaaggcgacgaacgcgcccgcaagatttatgaaaccatcggcgtgcacttcggctatgccattgcccactacgccaggttctatgatatccgcaacctgctcttcctgggccgtgtggcttccggagacggcggccagatcatcattgacaaggcggaggaagtgctgcgcaccgaattccccgagctgaagatccagctccgcgtgccggatgaaaagaccaagcgccacggccaggccgtagccgccgcttccctgccggccctctcctgacaggcggaatgaaatttgcgggagggaccctgtagggggtccctccctgctcatatccggagggggacttttgccggatgcgctgaacagcctctgccgcgccggattcccgcccctcctttttccgattcccgccccgacgccctgcgttcatgaatccccagcaagacaacattgttcattgcccggaatgcgggcaggccatggacgtttcccaactgcctccgtatgccaacgccatctgtccgggctgccaggcgctgacgcgcgtgaaaacgcgcatgggcccctaccggattaccggaaaactgggaaaaggcggcatgagcgtggtataccgggcggaagattccgtgctggggcgggaggtggccctgaaggtgctgaatgacacctatgccggggatgccctgcgcagtgaacgctttgaacgggaggcccagatcatggcgcgggtttcccatgaaaacctggtgcagatttatgccgtgggccgcgaccagggccttttttacattgccatggaactggtggagggcagcggcctggatgccctgattaccgcggaagaacgcgtgccggaggacaaggtgctacgcctgacgctggatatcgtgcgcggcctggacgccgcctggaacgcgggcctcatgcacagggacatcaagcccgccaacgtcctccagtctcctgacggagtcgccaagatcgtggacttcggcctctccctgctgcacagtgaatccgacgtggagcgggaaatatgggtcactccctattacgcagctccggaaacgctgctgaggggagaagaagacttccggacggacatgtacgcgctgggagccaccatgtaccatttgctggtgggcgctcccccccgcgtggacgcttcccagtcttccgatgtccttctggagaccaagaaaaaccttccccgcctggaacaggtggtcaatgacgtctcccccatgacctgctttattgtggacaggctgatggcttttgacagggaagacaggttctcctcctatccggaattgatggatgccgtggaacaggccctggaggaatacaccctggccatgcaggaatccggcctcacctggtcggaacggcgcgcggcggaggcgcggcgcgtccgccgcaggaaatgccgcattatcgtcatttcctccgttgcctccgtggtggcgctggggttgggcatctggggctgggcggcatggcagaaggggaggggcgcttcccccggaacactccctccggcgctcactcctacggcgggaacgggcactaccccggaggacacggctgcggcggaatcgcggctggagcgcagcatccgcttcggtaagctgttcaatgaagcccaggaatccctgaaccggggagacctggtgaaagccgccgccatgttcggggatctggcggaccagccggactgccccctttccacctcactctgggccggtctgaaccaggttctgtgcatgtggacgcgcggccagttcccggaaggggtggagcgcctggaagagctgggcagaaaggtggaggcctgcaaggaccctgcggaactggaacgttccagggacgtcggcaacctggtcatgtacttgagctccggggactggtcttcccgaatgccgggtttgcgttccaactccgatctggccgtgcattactatgtgggcatggcgctgaaatcctggtactttgccggtaaatggccggaatacagcgtttttctggacaaggtggcggccgatgcggcggacgaccgggacaggaacgtccgtgagctggcttccgcctggctcaacaacctcaagagatatacggaccagtacgaacgcctgaaacgccttcaggacatgccggaaaagacggtggcggaagtggaggccaaacgctccgccgcggacttcctgcgggaacagatgatgatcggggaggtgcccgcgatgcccccggcctatgccgcgctggaaggaatgctggaccatttgagaatgcagtaccagacagcccgtgactgggaggcggcggaagccgtgaagatggctgagaggaaaaaggaggaggaaagacaaaaagagctggaggaggaaaagaaaaaggaaaccctgctggccgcccaatccagaagctatgaagacgtttgccgggaagcggcggacgtcatgaaaaaaaccggggactttgaaaaggcctccgccgtttacggcggggcggaaaaggttatttcctcccccgccgtcaaggccaggctggccgtgcgccgggaaatgacggatcaaatgctgcccctgttcacccgcatggagaaaattctgcccgctctcctggaaaagaaacctggaaaacccctggtgctgaaagacggctccaaggtgcgcctgacagggatgaaggggcatctgctgactgtggaaccgcaggacagccgggaaggcagtgatgcgtaccaggtcagctggaacgagcttccgttcaactccctgtatgccctggcgcgggaatgccgccagaagcagcctgcggaattctcccccctggcggatgcgtattccaagccgctgcttattttcggcagtctgacggagaccatttcccccgcccagcaggaaaatgcgctgctccagatggaccgcgccttcattgaaaaatggaacctgtggatgagcggtctggacgcggaggagacgcccccggaagacggtgaagaatcggattgattccggcaggctcttggccggaggagggcgggaaggccgtgccgacggtggaaaagtcccgtctggaaaaggaaccctgcgccggttttgcggaaaagtaggcgtgatgaagtaaaatttgcttgcctagggtactccgtacaggtctcatagccgcatgagactgatcagctttttgacgctggcatgcgtggccggcatcctctcttcatgcggttgtgactgtcacaaacacgcggacttcgcgctgaaggactaccagcccacctccagcaagcaattccgttaactgcttgaatatgtttgaaattcgtgaaaagccggaaatggtggagcgggccatgctcgtttccatctacttcgacccttccgaggccagggaaaaacaggccatgctggacgagctggaagaccttgtcaccaacctcggcatcagcattgcaggcaagcacctcatcaagtcccgggacatgcacgccaaattcctgtgcggcaccggaaaagcccaggaagtaaagcaattggcgctggactgccgggcggattgcgtggtgtttgacaatatgctttccccctcccagcagcgcgaatgggaacggctgattgacgaatgcgtgattgaccgtgaagaggtcattctggatatctttgcccggcgcgcacgcacgcgggaggccaccctccaggtggagctggcccgcatgcagtattccctgccgcgcatggcccgcatgtggaaccacctggaccgccagggcggcggttccggaggaggcaagggcggcggcggagccgccaggggcgaaggcgaaaaacagattgaagtggaccgccgcctggcgcgcgccaggattgaagccattcagaaggaactggccctggtgacccggcagcgcgccacgcagcgcaaggaacgggagcgccaggccatagccacggccgccatcgtgggctataccaatgccgggaaatcctccctgctttccctggtatccggttccgaagtcatggcgaaggacatgctttttgccacgctggacaccacgacgcggaaaatagaacttccccacgggcagcccctgctgctgacggataccgtgggcttcatccgcaaccttccccaccgcctggtggaggccttcaaatccacgctggaggaagccgtgctggcggatttcctggtgcaggtggtggacgcctctgatccggaagccgtgcgccattatgaaaccacgctggaagtgctcggcgagctgggcgcgggcgacaagcccatgatcgtggtcctgaacaaggtggaccttgtgccggaagaagagcgccacacgctggaaaccctgttgaaaccccacttcaacggcagggtggtgcccatgtccgtgcaggaggggcatggcgcggaagacctgctgaacgcctgcgtggagatgctggaaagccgcgtccggcgcgcgcggttcctaattccctatacccggagcgacctggcggccgccatgcacagtgaagggaaggttctctccacggaatacgtggaggaaggcaccctgatagaagccgtgctccccgtggcgttttataacaaattcagccgttttctggcggaaaaatgatttcctcttgattgcggagaaaccgcatcctcggcagggaaattattcttttttcttgaatttttgtatgttggatatattatatccagcatctataatgaataagttgtgctgtattattttgtgcggaataatttcctgggccactgtaagcgcccaatccctgcctccggatgcccggaaattgaaggaacaatatgagaacatcctttcttccattaatcagaaatatgaggcgtccaaattgaaagcctatcgggattccatgaacaaatatgccgcgaagaatgacttcgcttctgcggcggaactgcagaaagtcgtggaatatttggagaaccgcttgtcagccaaagaacttgttgggagggatgaactggcccggatggaaaaagtttctcctaaaataggcgtacagatgaaggaaattcaagaagatgtggcgtctaaaagaatgaaggaaaggaaaaagacggacagggcctacttggatgcccttcttaaaattcagaaaaagtacgccaatctcggtaaaataaatgaagcgctggccattcaaaaggaactctccgcagttcgtgttattgcctcttttattgggcggtggaaaacggttaaaggggataccgccgcgaatgaaattctttatttgaatgatgattgctccgtctttttgggcaagaacggaaaagaggttacttggttgggccacaaatcattcagggtatctccccaggcagagaaaaccattgagctgttgaacgacaaagggaaccccagcggatccctcaagatgctttccaattttgaaatccagtcgccgtctggctggaaactgcgcaaaatgaatccctgatgaagaaggcaggagcgttaaacgtacatttaatgctcagtaacccaagctccgcaggcattccagcacctccctgacgggcaggccgattacgttgtccgtatctccgcgcacggaggaaatgatcatctccccgtgttcctggaacgcgtaggagccggccttgtccatcacattcaccagctccatgtagcggcggatgtcctcttccttcagctcccggaacgtcacttccgtcagcacggccaggtctttcactcccaggggggaccggatggaaaccgccgtgcacacgtggtgcgtccgtgcagagagcatccggagcatggaacgggcctcttccccgttttccggtttgccaaggggaaggccgtccagaaaaacgagcgtatccgcgccgatgacggtggaatccggatgttcccggaatacggcttgcgcctttgcccgcgcattgtgcaggcagagttcctgcggaggcatggcggcgtccttcagctcctccgtatcccgtacgacgagggagaaaggcacgccggccttcgccagaagctcgcgccgccggggggactgggaggccaggatgatggggggaagcatggaaggagagccaatagttaatatctattaactattacctgttaattgttaactatctgcttcccataatccggtggaaggcctccggagaaatttcccggatggcccggatgatgttcctggagaatccggccatgcgcttccgtaccgtttcccggtcttccgcggattcaaactccatgcccaccagggcgcggcccacgcgttccccggtataggtgtaattgaagtagcagagggatgccaggtccgcgatgcgttccatgaagtcaagaaaggctccggcgcgttccggaaattcgatgtggacgaacaggggatgctggcacagctccgcttggtagtgaatcatgcggaagcgcacgtcgtcgtcctcgctgatgtcttcaaactcgattcccttcttcttcagcgtcgtgcggatggtgtccaggtcttcgtcagaggcggcgatgccgaacacggggtactgggtgttgccctccgtcttgccgtactgcacgtccaccagcgtggtatcctgcgggatgtggcgcagatacttgagcacctggccgcgcttggaatccatggagatgcgcaggtagcgcgtttcatggttgccgatgcccgcctggcgggcgatctgggtgaggtgggtgaaatccatgttggctccggaaatgaccacgaagctcttttcctccggcttcacttcaccttcgttccattgtttcaggaatccggccaggctcatggccccggagggctccggcactacgcgggaggattcccacatggcgcggatggcctggcagacttcgttattggtgacggtcacgaactcgtcgatcagttcccggcaaaggggataggtcaattctccggggatatggacggcggttccgtcgcagaaaacgtccacgtaatccaggttcacccggtgtccctgctcaatggaggttttcatggaggcttggtccacgccttccacgccgatgaccttgatgtggggccagaactttttcagccagcaggctacggaggcggccagtccgccgccgccgatggcgacgtacgcgcggtcaaaagggccttccccgctcatcaccacttcatccgccagcgttccctgtccggccatggtcaccagatcgtcatagggatggacaaaagtgcttccgtgggtttccgcgtactcgtgggcggctgcggccgtctcgtcatagcagtctccatgaagcatgatcttcacgtgcctgccgccgtggcggcgcacttccgtctgcttcacttccggcgtggagcggggcatgaaaatggtggcgtggcagttcaggacgctggccgccagggccacgccctgggcatggttgccggcggaggcggccacaatgcccttgtcccgcgcctcctggctcagtgcggccatgcaattgaacgctccgcgccatttataggcccggatggggcccaggtcctcccttttggcgtataccggggccttgatgcccggcagattcaatcgttgaagaggagtcggttcgccaaccgtgtaaacgcgctggcgggcttgcagtatttcctcggaaagacggtccgaaagtatgctcatgattgtaatgctggctctcattctaccgggttccggccctcttttccagtaaaacattgccaccggactgcctgtttcccaggtcctggactttccgggcacaaaaaaaccgccgggaggcggttgtttctttgaagcaaggtggcgaagcggacggggctcgaacccgcgacctccagcgtgacaggctggcgctctaaccgaactgagctaccgctccgtgaccttggatgctgtgttcctgccttgcggcggggacgtggaggcttatacaggcactcccatgggaatgcaagacaagaaatcactttttcctgcatgcaggccgcgcttgctggaagaagcgggagaaatacccgtgcggatttaaaatccggaaatgttccttaatgagaccagatatataataaaatattgataatgcccgtacttggcgccggtattcccactcttcttcccttcctacgcatcaagccgttcaattgtcctaaagcgcttgacattaaaaattgtcattgactccggattttaaatccgttaattattactaacgatatagtctggtatataatttattattaattatcaacacgttacaaaattatgcgtccgcatttgcccctccctctcctgtccgctcttctggcctgtttcatttctccgtcatgggctgcctatacgttaacgggcaacggagaaacgacgatatcctttgccgacgaccagtatacgattacgccgccggcgggggatccagtgactcaggcggattcccccggtattatctatttgacggatattacggctggcggaacctatgagggtggctatgagcgtacgttgaatttggaaggagggacttactccggtattcagctctacaatgtagcgggaaattcggggcaggccgtgacaattgaaaatccatgtaattttaccatcaatattggggccggaacctcttttctcaatgtggttcccaatcataatttcatgatatggtccaatgatgaccggattattccggggaattttaccgtaaacgtggatgcaaatgctggcgaaatcaacggattcggaataataggggatggaaacaagatggatgctttccggacaacgggaacctatacggtgactattgatggcggcaattggacaggagcggttatcgggtccggaaatgacgccgtttatttcaccctggcactggggcaggaatccttcctccatacgggagacgtcaattttaccgtgaacggagggacatttgctacgctggtttccgcgggtacgtcacgtggatctggtcaattatccaaaatcgtcggcaatgtgacgttggcgttgaatggaggcactttcaacggggacatagcgttgctggggcggggacaggcccagctgggagatggaacgggcgcctatacgggaaaacttgaaatcaccgggggtacttacaatgcaaatatctacggcctttcttccggaactgtctcaacttcctctggaagggttgccgccaattcgtctgccttcctgaatataacaggaggaacgtttgcgggaagcgtctttgcgcagggagttaagacaactatcacgggagctactttttccggagacggaaccaagaaaatttttgcgggcgcccgtttaagcacgtcagcctggagccttactgataccaatatgacgctggacctgggcagtggcacggtagcggccatgattgcggggggaagctgggtggaaaccggggaaagcacgttcaatatcacaggttccaccaacctgaccttcaagtccgggacgtatacaggccagatctggggcggttcctacattaatggaaccgctacggctgcccttaccggaaatatcggttccaccaatatcacgattacagggggtacatttgacggagcgcaaatatccctgggcacgtatgtggaacgcaacaacaccagttccgcattgacgatcggggaagccaacctttccatcagcggaggcacgtttaacaatgccgccatttatgcgggcggccagaaggtcaacggcacttccctgaccacggcgctggccaatgtaaccattacgggtaatgacgccgtcttcaccgggacgacaactctttccggccaggggcgcggggatgtggtcaccaaaagcgtgctgaacctgaacggcgtgacgaaagcggacatgttcgccaacgcgaccgttaccgggtttgacgagatatccgccggagcgggcacggatgcaatcattgccaatgccacggttctggatgggcggagcgccttcaccaagagcggcacgggcaagcttacgctcagttcttccaccgggtttgcgaatgccctgacggtttccgggggagaactcagcttcgggctcgccggcggagtggccttcggcaattccatcacgatgggagccggggcccgtcttacctctgcgggtgatatggctctttctccggcttccggcctgacgctggacctgacggggctgaattcctccagcgcttccatcatccagtccggcggcacgctttccttcaattcggaaggtacgctgaccctgacgatcagcggggtggaccagacgatggaaaacgactacaagctgattacggcagacagcttcggcacgctgacggccagcaacttttcctttgatcccagcggtctttccggcgattacacttatgccctggaactgtccggaaacaccctttacctgcgcgtcaaggcgctgggtgaagccctcaactggaacggaggggccgcgggtacgtggacggcagcgggaggcgcagacatctggctggacaaggatgggacggcggtcgtttatgatgccgccaaatccgccaactttgaagacctggcaggcgtggccgcctccgccgtcactattgacggggatgtttcctccgcccgccttacggtcaacaatggggaaacggcctatacgtttacgggcacgggagcccttgtagacggcgcgaatccgatgtccctcgttaaacggggggaaggggagatgaccattgaaaataccggaaccaatacgttctccggcggcacgaccatcatggccggcaccctcaacctgaatgccgtccagggcctgggcaccggcacggtgacgctgaacggaggggaactggtgctgaacacggcgggaacgacggaaggaacgctggggctggtagcgaccaacaagctcatttttgcaggtggcattttcacgtacggcacgggggccacgcaggatatttccggcctcattgacgccgccgccagtaccagggccatccaggtgaatacgaacggcaataatattgcgtgggccacctatacccaggaactggggaacaaggacatcgtcaagctcggggatggcctgctgaccgttaacacgaccctgggaggcaccttcaccggcgccatcaccgtcagcggcggcacgcttttctatgatatcggggccaacggcgccacccggacctggagcggaaacatctccatcgcgcaggatgccactcttcaaatcagggacaaccgcgcccatgccagcacaatgacggatacgctgtccggccgcatttccggggccggttccctggtgctggggcacaaggagggaggaggattccccggaggaggccgttattccatcagcggagacaacagcggttttacgggcacgttcaagctggtgggcaacggcaccaacgccgcgtggaatgaagtggcctttgcgaatgcggccgcctttggcagcgccagcctggagctggacggacgcggcttttttgtcagtgattccaccaattccgtcaatgccgacattcatgtgagggcggcgggaagctggctgaacggcaattccaaccagaccgtgacgttcgggggcgacttgacgagtgacgccggggccaacctgggaacgacggcggcaggcaacccgacgctgaccaccatcttcaccggaaacctcaccggttttgtgggaaccatgcactccgggcaggggaatgtggttcttgcctttggcaacggcggtgcggccgccacgctgggaacgggcgaattcatcaaggccgtttccctgggaggggccggaacctaccgcgtcaactacacaggcacgggcagtgacctgctttataccggcaatgtgattgatacggcggctctggacgtccagggcggcgacaaactggttcttaccggggcgaacacgtccacaggggaattgaagattgcccagaactcctccgtccagctgggcgacgggaccggggataacgccgcctgggccggaactgtcaccggagcggggagcctcaccgtcaacaccacgggcacctttgcggtgggagaccgcgccaacggcctgacgggaacgctcacgctggccaagggtacgctggatctttccggcgcggcggccaccactaacatcctcattcaatccggttcgctggcgaacgccgggaactatgcgggaacggctgcgaacaaggtccatgtcaatgcggttgccggttccggcaatatcgccctgggcggcctggatgccgccggactgggaacggtcgtcaccgccactgccgggacgcagctcaccgggctcaagcaggggtccacctggaccgtgaccggcacgggcagcagccttgcggtaggtgcggggaacatttccggagatcccttcacggggacagattccctgattcagtttgaaggcgcgggggacaacctgggcagcatctcctttggagacggctccaccctcaccctggacctcaccagcgtcatggatgccatgaaaacggcgggcggcaatctggaaatcctgctgacgaacggcggttttgcgcaggatcttgaaacgctcaagggccacattacggccaatccgctttttgccgcgctgggcttcggcattgtagacgtcaacgggggcagcatcgtcctctccggtgatacggacctggtttacgtctcctccgtggacggcacgggcagtgcggacaatccggttacgaaccagtccctcaacttctaccaggccgtgatcgtggaccaggacctttacgtccagtcggacggctccatggtgatcaagaacctgaccgcgccgggaaccaatccgggccagacgggaacgggcaacctcattgtcaccaacacggcggacaacaagggcagcatcgaattgcagaacaaccttttccatgaaggaacgggagtggacaccgtctttgccgggaacatcagcggcctggacggtgccgcggccaatacggacctggtcaagacgggagccaacaagctcaccctgtccgggaatgtggcgctggccggagacatcattgcggaacagggaacgcttcagcttaacggcacggccaatgtggaagccctgcgccttgattccacggacgcgggctcccttgcggtgatcggcgtgggaggccacacgacggcccagacgctggcgtccggcgccaacggcggaaagctggatatcggttcttccggaacattgacgctgacgggagctaccgatggcctttcccgcacggaaatcggcggaacgggaacgctgaacattgcggaaggcgcttccctgggactggcggcggacagcgcgctttccggcgtggtgctggacctggacggctccctgagcctggcggcggacggctctgccggtggcctgaacggctccggagacctggagctgaacgggcagaccctgcatattcaggcggcttccggccaaacgcatacgtatgatggaacgctgggggccggaacactggatatttccggcgcaggcacccaagtcctgcgcagctccggtgcggataccgatttgacggtcagcggaggaaccctggttctccagggcaagccggatgtagacggcgcccatctcagctacggtaatctggtgaacaacggcaagctggccatccaggccagcgacaacgccctgacggcggtcaacaccaccctgagcgtggaaaacgccaccttcggcagcggttccaccaccaccttcaccctgaataccgacgccgacatgaccgccagcttcatcaaggcttccggagacattgtcattgaaaacggagccgccttccacgtcacgtcaattccgggcgtcaacatcacctggaaatcgggcaacccgatggagctcacgctgatggagctcaccggagccggaacgattgacctgggagaaaatacgctgacggtaggcggtcttttcctcacctattacaaaaatgcccatctggtgcaggaaggggacaaggtcgttctgaaagcggaggaacagacggacaatatttatgccggcgtcgctgacacggccaactccatggcgggcgccaatctgatttgggaagccgccaggcacggttccgtggaccaggccgttacggacttcctggccgccctcaatgacgacatggttaacaatccctccgccgccaggcgttccctggccgccgccgcgggcagcacggtcaccagcctgggcatcgcccagcgggacgccctgcgcgaccagatgaactggatacgcaaccgcaccaaccaaatgggcgtgaaccccgcctacgtcaatgcggacctcccctacttccacatgtggatgcagggcacgggctcttatgccaagctggacaccaggggggatgaaagcggctaccagctcaccacctggggcggcaccgtgggcatggacgtggacctcagcgaccacttcacgatgggagcggccttcacggccaactacggcgacctgacggccagcgcggcggacagtgcggacggtcatctggacagttactacgccaacctcttcggccgctaccagagcaagcgctgggcgcacacgctcatcctgacgggtgggtggaacgacgcgaagctcaatcgcacggtcaactacggagcgggcagctacagcacgcagggcaacaccagcgggtggggctttggagcgatgtatgaactgacctacgacgtgtacctcaatgaagacaggagcagcatcctgcagcccctggtcaacgcctcggtagtgacgacgcgcatggacggctacacggaaacgggagccggcaacatggccctgaacgtcgccaaacaggagttgacgacgggaacggttgcgctgggcgggcgttggatggggctcattggcagcaacatcttcggaagggaagcattggctgagttccgggtgaacgcggctcaggacatgggcgaccgccgcggagaagccaatgtggcgctgctgggcaaccccggcttcacgcagagagtcagaggagcgaaggtgggaatgacggcgctgcaaataggagcagggctgagcgtgccggtaggaatgcagggaacgatcttcgtggacggcaatgccgacttccgtgacggatccaactcggtgaacggaagtatcggctaccggtatgacttttaaggagagttgaagtttgagaggtgagagtggagcggagacgctctgctctcccggacccgcagggccgttccggcattgttcggaacggccctgttgcgtaaggagcgcggcttacagccgcgttttcgtttagttgccgcatcggcatgcggcgtctgttgggaaaatacgggaagctccgttttcactcttccagcagccggcctccgtcatgccattctccaaacatcctgttttcccgggtattcttcaggaacttttccaggcggctatggaacagctccggctggtttttcttaatctggatggtatccaggcgcacgtggcggtacaggcggggaaaggccaggaagttggaataaacgcgcgggtccttctgaagggcttctaaaatatccggatcaatccggaacgcctccgggtccatttccggcaggcatttttctccatggggggtcatcagccccagcctggtcaggcggcgtacacgttccttgttcagctcggaccatttgcttttcctggaacgtggggtgaggcgctgggccagaaagccggaggctgtcttcttgcgggtgctgtcaatccagccgaagcacagggcttcttccacggcgtccaggtaaggaatggcatggggggaaggctttctcgtcgtgagaatccagcagcaggaggaggaacggtggttctgttccagccacgttcttaattcctgccgtgtggtgatggggagaaggtagtctatttccatggaggttcggtggatgccgcttctttctgcagcagcgcgcaaaaagagaaggtgcgcaggccgtttttacgaaagggccttccgttgatgcgccgcgtgccgggatggagcggctaatggggtgaggttaccttcccggaggctgcatttccagtacaggcatgtttttctattccatggcatatttcccggcagggggcctgcccttcctccaagtccgggaatcccttcacggcgtctttttttctttctgcggacatcctttcccctcttttgcgtaaggaagggccggagacggtcccgcgcatgatggagtacggcacctgtccatcctttccccggaagaacggggaactggccttccatgccggcggcttttcaccggaaaggttattgttcccggagtggaggggcaggccgttcccgacgttcttttcacttccggcaaagggcggcgggttttgtccttgtcaaaacgaatgccgccattatacatgatttatgaagaaaagcgtgttgctggccgggctgggattggttctgctggcctccgtggtggtgactcttaaaatggcgtgtgccgaggattccgtcaaccgtgccgataccgcgcgggaacgggtaacgcccgtgctgaattccttcctgggcctctgcggggccaaggtgggggatcctgtattcctgcgtgccgtgaaggaagattccgtgctggaactgtgggtgaagccggacaaggcggaacgctacgtgcttgccaagcgttaccccattgccgcgtggtccggaaagctggggcccaaggaaaaggagggggacaagcagaccccggagggtttttatgaagtggagccgtccggcctgaatccccgcagcaactaccatctggctttcaacatcggctatccgaatgcctatgaccgctccctgaaccggacgggaagcttcatcatggtgcatggccgggacgtttccattggctgcctggcgatgaccgatccggggattgaggaaatttacaccatggtggaacaggccctgattcatgggcagcagcgcgttcccgtgcagatttatcccttcgtgcccactccggcgcgtttattgaaggaaaagaattccccccacgccgctttttgggcggacatggcacgcgcgtgggactggacggaacggacccacaccccggcccgggtgaatgccgtggatggcaggctggtggttgtggaacaataaaaatcctccggccgggggccggaggatgggaaaggtgcggaaggaaaggggaacggttgcccctgttgccgcgcgtccgggaaagacgtgccggaacgctctagacgagctgggcaatcaactcttcgcggtcgcccggcaggaagtccatcggggcgatttccggcagcgtgtagcagccggaggccagtttcatgctggctcgggcgcaagccaccatgacctgggcggtcagggccggattattgatgcgcatttcaaacgtgaacatctggttctgcgtggagccggaaacgcccttgcgttccatcagcacgccgtggcccatgtccttcagcgcgtcgatgtcgggcacctgctgcacgcgggtgtcgtcatggctgaaataggaatcggacttgatggcgaactccacgtcggagaacttggctccttccttcagcaccacgtaaaccatgcggcggtgcacgccggaaccggtggggatggtgagggaaagggcgtccgccactccttccttggagcgtgccactacgctgtggcccatgctcatgccggggccgaagttggtgtacgtgatacccttgggggccatggccagcatcagggtgcggatgacggagtccgtgcccgggtcccagccggcggagatgatggagacggcgtcatgcttgatcgcctgtgctcccagggagtgccgcaggttcacgatgtccccgtggatgtcaaagctgtccaccgtgttgatgccgcgggcgagcaggggcagagccgtttcttccacgctgcgggtgggggtgcagagcagggccgcgtccacatggcccaggtcctccatgctgcttgcggtcttgatgccgtgcacgggttcgctgccggggcggcggacgatgcccgccagttccatatcgggcgcggcgcgcaaggcgtccacggcgtatttcccgatgttgccgtatcctacaatggctactttgatcatcttggtagtaaatagtaatgattccgggagcggggacggaatgccctccggatgttttctcccgttgacgcatgttttttaagcgttgcgggtgcgcatggcaagaacggagaatgacaggagcgcctgtgcggcatcatgaagggttctttgaacggagtccggagaaatggagtctgaccactcggaactcttccaataaaacgatgaaaagcaaattgattattctgagtatcgccacccttcttgggtgtgtttcctgccatacgatcggcggagtaggcaaggacgtggaagccgtcggcagcgacattaattccgccgcccgctccaccagccgttccatgtaaaaagactgtgtgtgaccatggacgaaaaccgcttcatccggatggatgaagcggttttctttgatgggcgtgacgccttttttccagcctccggttttccggctccacggaatgttcccggtctctgtgaaaaggggttttttacgatgtgtgacggaagcaataaaaagggcatgccgtatgcccggcatgccctttgaaaagaaattaaccttccgtttttaacggcggcggcgcagcatcagggccgccaggcccagaaggctcagggaaacggtggccggttccggcacgccgttgatgtaggagacgtaaatcttgccgtccttcgtgaacacctggtacttgcctacgttttcagcggtcagttcctcggcggcgatgtcgtcgctctgcgttccgcccgtgatggtcgtgttgttggttgcggcgcttcccactccgttgacgagttcgcgcgtcacgagctcaaatgtagttccttccgtaatcaggtcgcccagggaggcggagaaggcgaaacggcccagatcggtctggttcgtaagattcaggatgccggtcgtgcccaggtccacgaacaagttgttgctgttggcgttccaggtaagcgcggcagtgaggttcagcgtgccgtataccgtccagttcatgttctggtcgcaattggctacgatggaaccgctcgttttgccgacggtcagcgtggagccttttcccacggagacggtcgtgcgctggaatttggtgaaattctgaagggacacattggctccgttggaaacattgatggtggaggtccatccttccacggtggtgccgggaccgcataccacggtatggttgccggatacgttgaccgtgccccagttgggattgaccagcggaatatcggcgctggcgccgctttccgtctgccagttggaggcctggctccagtcggtagaactgtcaatgggagcccatgtataaatagcggcctgcgccgtcatgcaggaaaaagccagcagggaggaaagcaggatcagagttttcttcatatgaatgcgatgtgaattagagctggaaagggaaactttcaagcccgcgggaatatgccggattacaaatccggggtcaagggccgattttcataccaaggaacttatgctgcctgaccgttgcaccatgggagaccgtttccgtgtaggaagccttccggaatgaggaagccggcccctggaacgccgcaagcctttgcggccgttgaaatatacgtgtcctgccaggacgcactgattttcagggaaaaggattcgctgccgctcgggttaaatacggatgacccaagaacttgcggcgcttcataaggcatcgggaccattccatgttaatctgtaacggatttgtaatccgcgggcggcagagcactccatggagaaccgccatccatgaaacgatgggggaaactttaaatctttgcctcttttgaattaaaaagaggctccaggctggtggacggatgcttcttccgctttactgcatggactccctggtggcctgggaggcgttgtcaattttgctgcccatggcttccacgtcttttccgattccgctgatggtgttgcaggaggcaaggccgagggcggcggcgagcgtcagaagggcgagtttggtattcatcggtggaagagaggttgaaagccgcatcctaccctgcttccggttccttgtcaatgagccggatgctttccggaacgcctctttttccgggcatggggctttccggcggggaagaaagtggctgtgccgtgcccggattcggaagttatgtaaagaatcttcgccggggacttggcggcggtttattgatgaaggccgcggggccttcattcacgggggaatcgctgcgtggacggctgccgggagaagggggctttttccccttggctagatttctccctccggaccgcctggcgaacggcgcagtttccttttcagcgccagccccgtgcggaccaggaagtaaatggccgcggcggccagcagaacggccgcgacgggaagaacgcaggccagcacggcgacgatggaggcggatgccgtttccgccgtggtgacgacggagttgcccagtccgcccgtagcggcggaggccgctccccggatggcggccatgcctccgtggatgatgcctgccgctccgcctccggcaatggcggccagcccccatttaagcatggggtccatgctgccgatgaagccggcggccaggatggttcccgcaacgatggcggtgggagctcccagcacgtccagcgtgtggtcgatgaccgggatgtagtacgccgctatttccagcagcgtagctacggagagggtgaccagcgcggccgtgccgcccagccatgcgaattccggcgtcaccgtcaggaagcctccccggatggcgatggcggctaccagcagaggcacaaagatgcggaagccgcaggccgctcccagcccgatgccgagcaaaacgcccatgacggcttccatattcatctgcggatcagttcagtttaacggtggttgcagtcgtggccgcctgggtggcggctgcgggagccgcagcggcgggagcctttttctcttccgtggattttcccaggaaggcgggcagttccagccccacgctcttgccgagctcgtggagaggcagggtgtctttcaccagattctgcacgaatccgcccacggaggaatcccctccgttgcccatgacgactaccttgtcaaatttcaggcccttgatggcgccggactggagttccacgatcttggtgagctgttcggtaatcaggaggctggaagcggcgtcggacgagcctgccgcctgtacgatctgctggaagccgcgggccttgccttccaggacggcttcaatggcggcggcttcaccgcggcccaccatttccatgccttccccttccgcctttttcttcagaagggtggcctgggcttcgccttccgccagttgccggatggcttccgcttccgccctgcgctggatgagcagggcctgcgccttgccttcctgttccagcttgagcacttccgccgtggcctgggcctgcacttcgcgctggctcttttcaatgcgggccgtcaccaggatgttggcctcctgcgtggcgcgttcgcgttcggcgcgctttatttccgcttccttttccgcctcgtaggcttcttccagggtcttggcttcctgcaccttctgggccacttccgccagcttcttggcttccgcctgcttcacttgcagcttggcggcggattccgcaatcttgatctgggcttcgttctggccctcaatggcaatggcgcgggcgttcgccacctggacggtctggtccttttccgcttccgccttgccgatttccccgcggcgcgtttcttccgccaccttgatggtggcgtcattgatggcgcgcgcggcggcttccttgcccagggcgctgatgtagccggaggcgtcctgaatgtccgtgatattggcgttaatgaggtggaggcccaccttgtgcagctccacgtccacgccttccgtaatgcccttgatgagtttttcgcggtcggagttgatttcctcaatggtcatggaggcgatcaccacgcgcatctggcccatgatgatttccgcagccaggttgcggatttcctcccgggagcggcccagcaggcgcgcggcggcgttctgcatgatttccggcagggtggagatgcccacgatgaaggaggagggaacgtccacgcggatgttctgggaggagagggcgccctggaggggcacgtcaatgttgatggggttcaggtccaggtagctgtaggactggaggaccggaagcacgaaggtggaaccgccgtggtagcatttggcgggctggcccgtgcccaccttgccgaagacgatgaggattttgtccggcgggcacatgcggtagcggctgaacagccaggaggccgtcaggatgatgaagagaaccagaatggcgatagggatgatttggtccatggtattggatggggtgtatggttgggtttattggttaatgaagaggtttgacggtgacgacgcctgccgtgacggcgactacttccaccggggttcctgcgggcagggattcctccccttcctgaacggcggggaggtacagaagctggctgggatggacgatcgtcacctgtccgccgcgttcaagcctgccgggaatgctgatgtaaacggtgccgtgcatgcccttgagggtttcatagttcagggtgccgtctgatttgaggctcatgatgaagcgcatggagatgccgatgatcaggaacatcagcacgccggtgaagaaggccgctgccagggaggcggccattccccagcccaggccctgggcgagcacgccgccccagccgaagcccaggaagaagccgatgccggatttaatggacagcaggcccacgtccgcgccgccggcgtccgcatcaaagtccaggtcatgttcccccagcccgaacagggacaggagaaacagaagcgctcccacgcccgtcgcggccacggcgatgatgaagaaaatggagtaatcagtcatagggtagattgattgccgggagtatccatgtttagagcccgcttgtctatggaaaaaggaacggcggccggatattccggcctatttcatttccaccacggctttttcccccttcttgagctccagttcccggagcaggaggaagtcgttggtcagcaggccggccttctccacgggagtggcggtttctccaatggtgacggtggcctttttggcggtgatcctgttgggtaaccagacgcccaggcgcgccttggcgtccttgttggccgtgacggtgaagcccttggcggcgtccgcggggtcgttccactcaatatgccacggggacggagcgcgggattcatccaggcgcgccgtccaggcgggatccccgtaaaaagccacggtatcccggtcatggatgaggcccatctggtccttgcccatgccgtagccggcggagttcatgcccctggcaaagtccgggtcgtccttgatgccgttgatgtccggcgcgttaaagttgacgttcatgagcttggggaagcgggtcatggtttcgtccagaatgaactggttgttcaggtaccaggcttccgccaggctggaggcgtcatggttgctgaacaggagtcccagcgttccccagccgcccttgccgtaccaggaggggacggtatagcccaccagctggttgaagccgtagtggctcagggcggtgacggccatggaattcttcgtttttttagtgtcccctaccaggcagttccccgcggctacccagacggcgggaaccggcttgatttcaatcgccggagccttgattctctcaaggaaggagagcaggtcgtcctccttcccgttgaagatcgcgccgcgcaggaaggtggtgaattccttgaactgctttttgtccagcacgtggaaccggttgttgccggagacgatgatccccttgccgaaaggcatttccagattgaactgggtggcgtgggaggccgtcacaaagagctggggagcgtaaagttcccagtattccacgagcttgggcgtcacgcccagcgtggtttcatccccgcggtcctgttccttcaggcccttcacgtaaaaagcgggcgttaccttgcccttggaattgtgctgttccaggtactggaagggctgccagtccgtgatgctcatgctgtcggtgaaacgggaggcgtccacgttggtggttcccatggagcggctgatcacgagcggctgcgtttcagaggctatcctcatggcgtcctgcggggtgtagcccgtgacgatgccccagatgcagtccccgtacgggtcgtcgtccaggcggcgggtcaggcggtgcaggtcattgaccagcacccggtctatttcctccggacgcgcgaccacggccatgaagcggggggccattttcttgagcgtgtccagcttggcgaacatggagtccttcacggtgacgatggagcctccgtgcttttcagccagcttgtccgccacggccttccattccggcatggcggcggtttcctcggagatgatgatggcgtagtcattcttgccggagtctttttttatggttttgacggcagtggcgtgaatgcaaaaagccgccgtggagacggcggcctgggtggcatcgggtttgtccgcctgcttttcagcaggcggagcttccgcggccggatggtccggcaggatgttcaggttgagatgttctcccttgccgaagatgtctttggcaagcttgttgacctcttccacggtgatggctttcacgtccggaatgctttccctctgctgggccagccgttccggtttggcctgggaatccctcagcacggaggtccagtagccgttgtcgcgctgggcgcggtccatggagttgagaatggggttgcgggcgcggtccagttcctcctgggtgacgttccccttgccgaggtcgtccgcaatcctggcaatcgcattccgcacggcatccttgttgcgcatcacgccggagctgagggtgatgatgtagccgtcgtccgggtaggtttcactgatgttgagcccggtggagggggagtaggtttcccccatgtcttcgcgcaggcccttgaacacgcggtcatagaagacggccttgagcatgttcagcctgcgggccagtttcttgtcttctccgccgggcgttttccagaagaggcagaccagcgtcttgtcaatagaggagtcataggtcaggtccttggagaagttgaagtccgccatggccgggtggcgcagtttttcatccagcctggccggggcttccgcacgcctgggaaccgcgcctacggtgcgttccagcaggggaatgatgtcctccgtcttgaagtcccccgtgacggtcacttccatgtaattgttcttcaggggggcgtccacccagtcctgcacgtccttgacctggtaggagttcaactgttcctgcgcggggaaggtgaagcggggattgttcttgtacagaatggcgggcacctgcattttcatggctccctgcacctcatggttcagcttgttgtaaatcatggggatggcgcggcggagcagggtgacgccgtcctggcggtagccggggtacatcaggtaggccgtctggagctggagctgcgtttccaggtcttccctgttggtgttcccggagagcaggaaggagcggtccgtcatggagaagcccacgccgactttcttgcccgccatgatggctgccagttcgtcgttggagtggtccttcaagccgccgccgttcatcacggcgcccgcaaagagttccagcccggaggccttttccggcctgctcagttccccgccgtccacggcaaaggtgatgttgatggaatccttgtcgaactccgtgggcttcaggttgacgcgcacgccgttggaaagggtgagctgggtgactcccaggtcagcggcttccgcgcgggccgtcaccttgccgggttccccgaatttgtaggagaagtccttccggctgtccgcctggtagggttccaccttggaggcccgggcgtcctggtacgtcttcatgatttcggcgcttccctgggcgttttccttgttggaggtgacgatcacgcgggggaaggctccggtccaggcttccttcagagcggcctggcattgttcgggcgtcaggttttccacgacttccctggagatggcccagtcttcctgcggcgtggtgaagaccttgtcctgcgcggcgctctgggcgatggcggaggccacgtcttccgacttgacggtgggccaggacttgatggcgttttccgcggcggcagtgatgttgctgcgggcttccgccagttcctccttgttgaagccgaattcgatggcccggcgcagctcctgttcaatggcggtcagggccggcttccagttcttgtagtccgcctgggtctggatggcgtccacttgcgccgcttccatcacgtccatgcgtccgccttccgcggaaatgaaggggcagtccgcgttcttcgccatcttttccagacggcggttcagcatggcgtaagccacgttgaggggaatgtcctcgttacggttggcgaccgtgtccggcttcttcacgtagggacgggcgatgttgacgctgacttccgtgctggtggcctccttgttggtgatccagtgggcggtggtttccgtggccgtcttgagcgcgccccggtccgtctggaaggagtaattgtccttcttcatggagccgaagtatttttccacccagtccttgccctgttccggcgtgatgtccccggcgatgacgagctgcatctggctggggacgtagtgggtctgatagtagtttacaaatttttcccgcggcgcggtgcggattacttccagcgtgccgatggggtagcggtcggggatcctggtgccgtcaagcatgatggagaaaacctccttcatgacccggtagccggcggaatcccgcgccttgtattcactggtgatgatgccgcgttccgcgtcaatggcgctttcctccagcagggcgccgtccgcaaaatccctcatgatggtgaaggccaggttcacggtggactccttcatgctgggcacgtccatcatgtacacggtttcgtcaaaggcggtgtaggcgttcgcgtccccgcccaggcccaggccttccttctgcatggcgggaatcatttccccgcgcttgaaatgcgtgcttccgttgaaaaccatgtgttccaggaagtgggagatgccctggatgtcgtccgtttcattcagggaacccgtattgacgcgcaggcggatgctgaaccggcccttgggctccgcgttcgggcggatgaagtaggtcagcccgttggggagctttcccttgataagccggggatcctgcttgggaatgcctgccgccggttggacagcggcggcctgggccttgttttctgctgcggcttcggccagcgaatgggccgggagtaggcacgcggcagccagaatggaggtgatggtaaatgccttcatggaaaaatactgccctcttgtttcacacgattttccgggcaagtcaagcggccttctctgcataaaagcggtgaatttccggagaacctccggaaacggaagccatatcaaaaggatgaggaaggcatccattcatcccgcgggcgcggctctgaaattccgcagatgcggtccacgcagcactcccacgcctcccggccctggtagatctccacctcaatgcgcaggaagtaaatgggaacctccgggtcttcctccggtttttccagccgcacggcgtccttctccgtggtcacgatcatgtccatggcccggtccgcgcagcggtcgtagaactcctgcaattccgcttgttcaaaccagtggtggtccgggaacctgcggcagatttccacgtgggcgcccagggagcgcagggaatcttcaaagctttccgggcgcgcgatgccgctgaggcacgccacccatttcccctggagggcctccaggggaagccgttcccccgtgaacacgttttccaggtaccgggggccgtggtcgctcacgatgatgtccgccacgggattgtacttcctgatggcggcgatcagctcatcctggggcttgccgccgcatttggtcaggacgatgtagctggcgcgcgccaggctgcccctgggctcccgcagggtgccgcgcgggagcatggccccggtgccgaagggcgcgccgcagtccaccagcacgatgtccagttcatgagccagtttcaggtactgcatgccgtcgtccagcagcagggtgtcgcaccccaggtgttcaatggcgaagatgccggacttgatgcggttcttgtccaccagaaccgccacgccgtccaggttcttggcaagcatgaagggctcgtccccggaatgcagggggcccaggtagcgcgtttccccgtcgctggcgatcttgggcaggttttccggctggcgaccgtccttgtccttccactcctggggcttgtccaggtccgcgctcttgtagccgcgggtcaggatggctaccttgcggccgcgctgggtgagggtgcgggccagcagttccaccaccggagtctttccggtgccccccacggtgatgttccccacgctgaccaccagcgttcccagcctggcctgcttcgcgatgctggagtggaacaggtacagccgcgccagcaccaccagcctgaacagccaggaggccccgcgcaggaccatgcgcatcatggaggcgcggaaccccttggcccggccgaagatgacttccgtcccccactcttcaaactcttccgatctggatttcatgataagcccggcggcgcgcctggaaactccgtcagtggaggatgcggtggcagctgtcgcagtaaacggtttcgtggccgcccagcaccttcatgcgggcgttgtccgtaatgaccatgtggcagccgccgcagtggcctttttcatccatcggcacaatgaccgggactcccttgcttttggtcatccgttcgtattcccccagggaatcctccggaacggcggcggccaggtccgcgcgttccgcattcaagtggtccagaagctccttgtccgtttccgccgtccggtcaaagcgggccagcgtttcctccatctcgcgctgggcgtcccgcgcgcgccggattttctgctccatatccgttttcgcggtttccaggcgttccatcagctccagctcggaggtttccagggcgtcaatggcggcttccgtcttctccacctcctgaatgcacatctggtattcctcgtttttccgggtattggactggagggttttcatcttgccgatgtaggcgcgcttggtttcaacggcggcttccacgtcccgtatgctcttctcaacgctcgcgacttcctgcttggcggccagggccttctgcttgatggcctccatctggcgcagcaggcgcgttctctgttccggcagggaggccagctccttccggagtttggagatccgcacatctttttcctgaaggatcagcaactggtctaaatcggcatgattcatcgcctgccaccctagcatgccccggcggggtggaaaagattttttctcggctccggggcggcggcccttccgtctttttacggtgcaggggagcggcgtcccgtgtttcgggggaaagggggtttttctgagaaacggcctcccgtttcccgctgagtatttcaagcagggccttctgctgcgccggagtgccgccctgtgcgggcggcggcatggaaagttccgcatactgccgcgccagtttgtctttcttctgccggttctgccagaaaaggaaggcgcacacggcaagcacgcaggcgcaggcggctgccaggaccgtgtatgaatggcggttggagggcatgacgggagagactagccgtgcattgtagagaaagacgctcccctgttccaggtaaatcaacaacggggaaaagaaagtctgccgtgccgccatgggggcggaagccttccgcggctgttccggcggctcttaaaacgtcaggatggtttggagccggaagacgctggcgtttccggtgtcgtcccggcccgcggggttggaaatccacagcagggagggctggatcaggaaccagggagtcacggaaatgttatagtggcattccatcaccacttcctttttgcttctggaacggccttccgccatgctcccgtcgtccgggcgggtcacggccagggcaatgccgaactggttggcttccccctcctcgcagacgcccaggtgctggagaggctggctgcaaacgaagccgccggaccattggacggcggcgccgcagaagttgtcccgcgtggaatcgctccagcccgcgcggcagaaggccttccacgggctgccgccaagctgctgctccacattcagggcgatgccggccacggtattaaggttcttcctttcctccccgtccggcagttcgttgatgcgggccatgaagggggtgagcttgacggccccggaatcatgcacccacgccagttccgccaggacgttgaaattcttgccgtccgtgtgtttcagcggggaggcgttctgggggcagctggtgaagttgccgcccagcatggcgtaccactgttcgtggaactggtgctggaagatgacgcccaggttggaatccgccatgggaatcacctggttgttgacgaagggggaggcgcagaactggccgaaggaggaattggcgtagctgttggtgtcaaaataattcgtctggttcaccacgcccgcgactatggcgctttttccccggttgaaggtttgcaggagcgctatttccggcaggaagaagattctttccccgaagatgtccgtatgcgtgtctcccgtcaggccgatggcgtcattcatgttgccgcccctccacgtctttccggtcagcgcagtggagcctgaaagctccagtttcagccacgtttcccggttgctgggcgcctggatgaggcggtaattggcgtgggcgtgcagcaggtaccagagctgggtgccgggcttgtccggagccgggtggtggatggagttgtaggaaaaggcgttttccaccaggaattccagtcccgcgcggtgcgctttggagtggaggccggtcagggcctgcgtaagggaatcgttggggatgggggccgtctcgtccccgtaatccccgcccagcaaattgatgtccgccagcaggtgggccggaggttccggctggtccgggcggagcatttcggttcctgcctgtctgccctgggcggcgaaggctcccagaaggccgaggatgatgaggggacggtacatgttgtcaggtgaataggtaagcggtgcagggggcggaggggccctatcctaagggatggggcaggaggaggaaaagcggcaaatcacccccgttgagtcatgacgcagccggcggggcatttctgccgcggaaggtccggttcagggggaaatgccggaagcgcgccggaaagacggggccggttaaaagcccagggcttccttctgccagttcagcagggtggagacgcctttttccctgtcttccgcaatggcttccagggaggcccgggtaatcaggaaggagccttccatgcccagttcttcagccttttcatccctgagcttgcacaggcgcgccagattggcctcaaactggtcggaatgctggcggcgctggatgcgcgggcggcagggatagtcgtcttcatccagcaggtaaaatttctggagggcgtccatgaaccggctgcgcctgtgggagtggaagcggggcggaggagtcacggtgcgctgttcctgaagggccaggctccactggatgaggtccgcgttggagcagaccatgaacgcgggcttgtcccacgctttagcctccgcatcgcgccatgtccacagttcccggagggcggccagccccttcctgttcagcttgccgcagccctggatgcgccaggggtcctgatggccggccagatggcgttcccgggctcggtccatggagtgcctgcaaatctcttcaaaccagcccatgcgtcctttttcccggagggcggccgtcagtttgtccgccatgtccagcatgtaattcacgtcgttcagggcataggtgaccatggtgggggaaagggggcgccgcgcccagtccgccttttgggaggacttgctcagggctacgccgtggaaatgttccaccagggcggccagcccgaactggcggaagcccagcaggcgcgccgccgtctgggtatcccagatcatggcgggcagcgtttcccaggcgttctggaagaggctcatgtcataatccgccccgtgcatccagacttccgtttccttcagccagttgtaaaacggccccatgtcttcaatggagagagggtcgatcaggcaggagcccgtttcatccgcgtactggatcaggcagatcttttcctgatagcggtgcaggctgtctgcctccaggtccaggactacccgtcccgtgggctgtgcggtggcgcgcttgcgccattccagtaattcctctttctcgctaatcatcttattgcaacagagcgggattgaaccatgtatcagcacgccgggcaactggaaatgcaaaaaaagtgctgatggggcaatcatgtattgcctatttcccggaaatagggcacgaagaaaggcgcatggaagaggaagctacagaaaccggacgcaaccacggagaacagcctttggacgaattgatgaagcgctggcatctgaccaaccacgacctggtggagatttccccggaacagcttacccacaagcaggttcaaaaggcccggcagggacgccagcttaccttgaaaatgatgcagaaggtgtgccgcgccttgaatgtggccatctgggagcggcttacccccatgcagaaggagcagtattttgaatacatgcacaagcatgtgttcagctatgccaaggggtatgacccggcctggaaggatccgaacatggacatgatggcctgattccggacctcttttccgccgcggaggcacgcattcccttttccgtttcttgtttcgcgcttccgggggaaaccgggctgcggcagggaatttttttacaaggctggcggtttttatgaagcgtcccgatgccccgttttttcccgtttttacgggagatgggcagatcgtcccgggtatggtattgtgttccagcgggatggaaaaaaacagacattccatttgacagccagaaaaccagggtgtatacgccgcgctcctttttatccgtcatcatgatgaatattgcttttattacctgtttcgtcggtgttctggggatgtgtgcgggagcgtccctggccgagggcaagccgtggtccggagaaaaagttccgctggcggaggacggcgcggtagttctggatgacaatgaatacctgctgaacctggcggattatgaaaaactggagcagggaggcggtttgctggtgcggtatgcagccggaaagaaagggctccgggaagactccggcgcgttctattttgaaaacagccatggaaaaatggtgagcgccgccatggagccggtatccggaaatgccggaaaaacggaaccggagcgtctggccctggtcagtcccgctttcccgctgaatccggaaggtaagtggagcctcaagcggaagagcaggccagccgaactttaccggaagaaggtggccgtctcccacatggaccaggaatacacgttccagagccacgaagatgcgcaggtgaaactggtgcacggcgtgctggcaaatgccctggtatcgggaaataaccgctccaagagttataactctttcaaggtaagccgtcctaccccccccccccccccccctctttctgactcgctgaaggaaaattccggttcttcagacggggaggaagaggcaagggaggaggacggacaggcggaaagccatggggaccgggagaagccggaatccgggctgcatcttgcagagaatgctgttgcggtttccggccccggcagccttgccgcggtcccgcgcgcggggcacgacatcaccgtgaccggaggtggaagcgttgtcctggaggaaggatttgacggaacggtgcggatggaaggttccggagatattttcctggacagcgtcaatgtcagtgacggcggcaacaaggaaaagcattacggcctgaatatccggatggacggcggccccgggtccaaggtgtacctaggctttacaaactccacggcgcgcacggctttcttggaaggtaccgtttccggtacggggacgctggtgtttgagaacaccagccgcagccgggtaagcatttttgacctgacgggcgcggacatgagcggtttcagcggtgtggtccaggcggcggcgccgcgttccagcctctcctcagaggggtataatacgcccgtccagcttcaggcggcggggaatatgaacgccacggtcatggacctgtccgtgatccgccagggcggcaaggaccccgccgggctgggaggctggctgacgggcaatgcgggaactccgtccctggtcattttgaagctggagggggatttgaccgtctccggcctggaaggggccacggccggttcctcctcccgcgtgacggtgggcaatgggactgccgctaccctgaccattgacggtgcggagaactatgaattcaagggaatgatcggcgccgcgggcgcggacggcggctactacgtggggacggagaagaatgagagctacaagaatacccagcttgtggaggcggacggcaccggagtcatcaatctggtcaagaagggaagcggggagcaaaccgtttattctggccggctgggcagtctggacattcagggcggcgttttccgcctgggggcggatggggccctgaccgtagggaattccttttccacttcctccggcggcttgctggacattgcggcaggggccgccctcgcgctggattaccatgaagcggcttcccggctggggggaatgaactggcggtccgccggaacgcttgtcttcaacaaggggctggttctggatgtggacggaacgtttcaactggattcttccgtgcaatttgcggagggcagcctgctgacggtaatcatgcccgcatccggcattcaatccggagaatcccgcaagctggtttccgtgacggaggggaacaccatgtcctttgcggacgccgtgcagcgggaaaaggtcaggtacgccacgggcagggatgccgacggcagctggatttaccgggagctggacgtttacagcggactgaccctgaatgtgcaggggggaggccaatggcagatgctcgtaaccgggctggattccacttccctggaaggcacctattttgacgcggacaagttcaattactacgtctggcaggggaacgggtccaaggttccggacggcagcgtgtggtccgacggggcggcgggctccagcccgtgggaaggcggcctgacgttccgcaacggggagcgtgaagtcttcttcggcatgcaggatttatccggtcatgccgtggacagctttgacgtcatccttgacggaacggtgcgcgtctccagcctgacagtctccgtggacaaggaggcgaacggcggcatgggctatgtcttccacgccgcggacggcggcgcaggcagcattgcggacgccggaccggaccacgcgggcgagctggtcaaggagggcgcaggcatgcttaccctggctaccggcaatactttttccggcggaacggaaatccgtgagggcagtattctggccgcccgtgaaggagccctgggcgccggggacatccgcatggcggacggaacggaactgtatgtcaactacccctttgccacggagctggattcctcttaccgcaacccctccattgccaacaacatccggatcgggacgtcctccaaggacacggcgaaggtggtcatcggctactcccccctttccctggcggagaaggaagacctgcccggcgcaggttcctccggctaccagtgggattacctgacttcccgccactggcgcacgctgtccctgaccggcaggctggacggctatggggaactgacgctgatgggctatacctccacgacggcgggcggccaggacaagtgggtaagcatgttccacatctgcgatgaaagtctggccccgggggaaaagtccaatttcaccggcacggtcaagctggacaactacattctgtattccgaggcggactcccccgccaatgcggatgccaacaacgacatcctggccatccggaagcccggcgccgtacagctcatcgtggaagacgatgcgctgcggaacgccaaggtggacctgacgcgcgcccataccgtgaacgcggcggacaacggcaccgtttttgaaggaaaggaacgcatggacctttaccacatcctgctggtgcagaaggatgccgttctggcggggctgcaaggggatttgatcgggaaaacgcaggacagcgagtattacggcaagacttgcaccgtggggagcgaagtggatacgctgcgcgtgctgaccaactccaacagtacgctgacgctggatgtggacggtacggaaaagctgtattttgccggcgtcttcgggacggcgtccacgtatggctccgctacctccggcaaggtgacggccgccagcagggaaaccctttccttaaccaagacgggcgcgggagcccagtacattcatacggccgcggtcaaccgcctggtgctccgggaggggacgctgggcttcaacagcctcaacgtgaaaacgagcgccgtcctgtacggaggaaccaacctgaatctgggagtgacgcggggcgtcgcgtccgacggcacggcgcaggagtggggcgcggcggggggaggcctgaccatcaatcccggttatgcgcttcacatcgtgacggacacgaccgtaaatgccggtacgggggcagggaccgttgcggttcctgaaacggcggtggtgaacgggtccgtaacggtatccgattcctccttcctgtattttgactgctccatcctgccttccgagttgcaggagcatcccctgctggccgtcaagggactggaagacatcgctgattccggcagattgaacctgaacggcgatattctggtgcgtttcggaggatacgattttggagaaacggatacgattgacaaaaaatattatctggcgacgacggaaaacggcatttacgtggacggggcgctgggcggctttcaaacccgcacgatttccatcgggaacgggtggttcggcatcatcaaggtttccggggacaacctgaacctggttatgacggtgaccaatacgcccatccgcacctggtacaacggggaaaaccggagcgagggggaatacgtggccgccacggacaatgtctggtttgccaatgaattgcccgaaggggagggaaccgaccgcaaccactggctggagggcctggacaaaaatctgggccttaacggcttttaccgggatacctaccatgtggccttcggcgcggaaggagccgggaaaacaggaatggtggaaagggaggaaggaaaggattacaacgtggtgctcatcaggggggaagtgcgccccgcctccatccgcgtgaaggatgacgtcaactacatcttccgcgcccatgcggacggaggcctgattgcggacggggagcttccggatgactatgaaaccagcaactggaaaaccattctgaccaaggacggagccggaaccctggtgatggagacggccaacacgtattccggcggaacggaaatcaacggcggcagggtagtcatgagggatgccggagccctggggaccggggaaatccggatgtttgacggcacctccctggcgctggactaccagagcgggggctttatccagaaggtggctctgctgaataacctgctgacggtggcggaggattccgtggtgacggtgtcccatacggacagggtgatcggtggcgtcatttccacggtccggggggattccaccgccaaccttgtcctgcagcatgccaacggcagcggccagaccgttttccagctggatgacggctccaaattccatggaaagatcagcatgagcgggacgcaggacggccagggaacggtgcaggcctgtctggaccggaacacgtgggaagaagccggttttgatttaagcctgaatggtgtgcagagcacgatactgcatcttgattccgtggaggacgtccatcacatcaccctggccggcatcatggggcaggatgaggcttccttcgtgaccacggaagccagcgcggggcgcgattcctccaccgcccttttcctggcggtggggacgcaggaccggatttattgcggcaatgtgggctttgggcagtacatcgacatgtatgatacgggcctgcgccatgattccggctacatcagcctggtgaagacgggcatcttttcccagacggtggggaatgcgcgcctggcttccctgcaaattgacgcgggttccctcaaggtggtaaacactcttctgctggccggggaattgagcgtggcgcaggatggcaacctggtggtgggccatgacgaatggcaggggctgtacgattatgacgtgcaggtcaacgacggcggcgttctgcgcctgggctccggctttggttccctgaccgggactccctacacggaagacggagttcagaaaaccggcaatacgattcttctgaacggcggaggcgtgctgggcatgctggacgcggactggagcaatgagaatgaaatggtggtgaacgccggagggaaggcctttgtgctggatacgacgggttacgatccggactccatgacggcctccggaaacagccatgtcatgacgctcaacggaaccgtcaagcccggcggcgcctccgggaccatcatcgtcaagaacggcaatgcgggcaaaaacggccgcgtggtgctgggcgcggccaacacctgggacggggtctaccaggtaacggaccatgccgcgctggagctggcgcatgcgggcgcgctcaatacgaaagccggagtcgaactccagggagcggcttcccgactggacgtgaaggccggaacggtttcctacgccgcttccgtgaagctggcgggagcgggagcctccgtcaatacgctgaactcttcctccctctccgatatttccgtggcggtgacggcccgcaccggggccgcctcctccacggtggagcgggcttttctaggttcttccgccggagcgggaatcgtgcagggagcaggctccgcggcccgcgccctgttcaacggcgtcaacgtgaacgtcaggacgggagcggcgctggcccatacggaattctccggctccgtgctggaggtggccgcagggcaggaggcccgcgtgacggacatgctcattcatgcggcggattccggcatcaggctgggcgcgttttcctccctggccgtcactggcgtttccacaacggattccgtgccgaacctgaacatcagctatgcggacggcaacttttccatgacagctcccgatgcgtggacgaccaatgcgctgattaccggggccgggcaggcctccgtggacttctccggcggcgtgaacctgctgctgacggagtgctccggcagcctgattgaaaaactggtggaagcccgtgtgagcaccatcaacttcttgctgtatgacggctccctcaccaatgccttcagcggggattactccctggccaccgttctgtatgacgccgccctgaaaaacgccggcttcatcctggcaaacggggactcctggatgcgcgacggcgtggtgacgctggtgcgcccggttcccgaacccggtacggcctccgtggccttgctgggcctgggcgcgctgctgctgcgccgccgcaggagctgaactcctgaaaaacattccggcgccgcgcgcatgaatcatgcagacggcgccggaaaaggcaaaacggagcaaggcacggtccgaaaatggaaatactttattgggcggacttcgcctgctgccagcgttcctccatggcgtccagcgaggcttcttccaaagaaaggccttctttggcaagcaggcgttccatttcattgaaacgccgttcaaacttcctgttcgccccggccatggccgtttccgggtctattcccttcttccggcacaggttgactacggaaaacaggaggtcccccagttcttccgtgacgtgcggatcttcctccggcacgggaaggatctcctcacactccgcggtttcctccttcaccttgtccagggcgccctgggcgtccggccagtcaaaccccgctttggcggcttttttctggagcttccaggcgcggagcatgggaggcagtcccttgcccgttccgtgaaggtacggggtggcctccgcgcctttttcctggcgtttgatcttgtcccactgggtcagcacggcatccgtcgtgtccgccgtggactgggcaaacacgtggggatggcggcggacgagcttttcactcacttccgcggccacatcgttgaaattgaaacgcccggcttcccgggcgatctccgcatgaaaaaccacttgaagcagaacgtcgcccagctcctcccgcatctgctcccagtcgtccctctggatggtgtccaccacctcgtaggcttcctcgatcatgttggaaatcagggagtggtgggtctgttccgcgtcccaggggcagccctggggagcgcgcaggcgtttcatgatggcgatgaggcgctgcatttgaagggcaggctcgcggcattcgatcatttcagtgtcgttcatgacggagccatactaatcgcgcaagggcggatgactagcaaaaattcctctttacccggaacggttcttccctacactcgcccccatggaagttcacacgtggaaagaacgcacggaagaaggcaccctggtatacagggcatgccaccacgccagcaaatggaagctggaatgcgcccccaaggtgggccgtgcggaacgtgacgatgtggaatgggaacacgtggaattcacgcgggcgcactgggtgaccctgcgcgacgtgctctggcgcaagtaccagcgcaaacgctgcccgtggcgtttcattgaagccatagacaagcttctggaagacatgccggaagaggaggaacccggttctcccgatggggaggacgggcggtaggaacgcccttcaacttctgccgtgccggggatgctgggagcggttttcagggaatggctctcctgggtgtaccccttcgtctgcgagctgtgcggacggggcggactggacggctgccatgtttgtccggaatgccgggagcgtttcgtgcccattgaacctccctgctgcgccgtttgcggagaacctgcggaaggctccttcatcccgtccgggttatgcgcccgctgtgcggaaacggctccgtcctttgaggaagcccgcgccgcatacgtgaacgaaggggcattgagggagcttctgctggccttcaaatatgcgggggccgttcatctggccggaaccttcgcgcggatgatggcggaggccgtgcgcggaaatccccactggttcggcggaaaaaaacgcctgctcgttcccgtgcccatgcaccgccgcaagctggtgcggagggggtacaaccaggcgcaggaactggcggcgctgctggggagggaactgggctggccctgtgccggggtgctgaaacgcctgcctgaccggctgccccaggccagcctggcgcgggagcagcggctcaggcacgcccgcaggatttatgccgcggatgaaaaaagaatcaaacgtcatcccgtcgcgggaagggacgtgctgctggtggatgacgtttttacgaccggggccacggcggacgcctgcgcgcatctgctgctccgggccggggcggcttccgtttgcgtgctgacgctggcgcggacgcaccatgcatggcatggctgaaccggaatttcctttcagcttcaccgtttccttcctacaatggcagtcatgaatccggagctcatgtttcatacggaagacgaagtcatgttttatgatacggactgcggcggagtggttcataacctggcctacctgcgcatgattgaagcctgccgcactaggctgggagccaaattgggcatggattacaaaaccatgagcgatttgcagcagttcgccgtggtggtccgccatgaaatcgactacgtacgccccgccgtgctgggggacaccattctgacgacgggatggctgcaatccgtggaacgggcccggttctggtgcgattttgaaatgcgccgcgcctccaacaacgatcttctggtgagggcccatcagcagctggccctggtccggatgccccaggggcgccccgcgcgcattccagctgaatggcgtgcgcggtggcaggaatacatggaatcctgatctttttttgtccgtcttccattttgcgcttgccatgaaagggggcgtggtgtttactgcctccgcccttccagcaagggtaagtgcttgggtagctcagttggtagagcagtagacttttaatctattggtcccgggttcgagtcccggtccaagtaccattccctttcatacgttgaaactccgcaggaagtatttccgggcggagtttcttttttgaggtagccggaaaacgggcgggaacgtggtgttccaccatccaatgagcatgggaatgggtattgccgtgctgcccggtccgtgaggccgccggcggaacggaaagacggaaccgggcggggatgtccatcagggcaaatcatgccggacggcgcgttctatttcatggaacagcaggaaatggtctttcaaatggtacagccatgatcggatgtcggccagttcgtgggtttccagcatgaccaccgggaagatgaacggattttttttaacggagacttcaatgaggccgatgatttcattcctcctgctcaggacgggaatggcgaggtattgcatgtatttttcctccgggggctggttgcgcttccggaagaagctgcgccgcacttccgccgggccggagaggactacggggctgagatggcgttcagcgaacaattgttcatccagcatggagggagttcccgtcacgggccgcggaggctgggccagcagggaggggatgtcgttattgtgttctccctgcgcgtagcctgtgacgcgcaggaaggtctggccctgctgccgctccgcctggatgtaaagcacttcaaagatgagggagcttttatattcggccagggctgcggcgatggtggaacacaggaacaggcaggcggagttgaagctctccgtcgttgcgcgggagccgtccgcttttttctcccggcggttttctccattcagcttgttggcgaagttttcatattccccgctgagggcggcgtaggtttttttgtaaagagccgcactgcggtttttcagggtgcaggcctgtttcttcatctcccggttcctgttgatcagcctctggcattccacgtgccacacgatgaaagcggcgcccaggataaccagcaggacgatttttcccgtgttggcgccttccatgggcgtccctccgatgatggagatcacaacgaccaggatgggctggaacaggtttgcttttttgaggaaggagggctctttgaacataagaaagatgcgggagaaaggttggttgaaaagaaggtgatgctgtacaagtcttgttaaaggtgtgttatttgttgattatcaaaaatattccatattgaaggttgaaatggtgcggaatgaaagcaggaagcggagaggttttttcttatgccatcttaaattaagtttatttataatcaatgagttttttgttaatttagaagcattctaatacgatatttctttgaatgataaggcttcctttgttccaataattgttaggaaaaaataagagttttccatttgggaaacgatttgttaaatcgcagtgttttgatgtgttttattttgattcatggaatatctttgtttacagggtaaaagcatggagagccggagcaagctccgtccggagggccggactccttgcggaattgtccgtcaatatccggatggagaaaaggaatggtgaatgggcccccggatatcaaggggggaacaaatattcttccggctttttaccggaaatgatgcgggttccggctccggtggctgcggtgccggaacgtcagggcttgcccctggaaaaaccctgccgcggtaatgttccgtgcgcgcctgccaggctacccgccgtgccgcattattcggcatggttttcttctgcccacttcctgtactgtgcggacagttgttcaataagcggctggtgtctggaagcgaggtttttttgttccgtcctgtccctgatgtcgtatacctgccaggggccgcggttgggagccaccagcttgaattggctggtcagggccgcgcggttcctctggtgctcccagaaaatggtgcgggaagggcaggtgccgggaatgtagtcccataccctggatggaggaagctttccgggattgacccagtaggcgttgagcggtttgccgtccatgtggacgggaaccggaagctgcgcccacgccaggcaggtgggggcgagatcctgaagcaggaagggggagtgatagcgcgcgccgggacggattctggaagggtagcggatgatgaaaggcgcggacaagccgccgtcaaaggtctcaatcttatactggcggtagggagtgttggacacggccgcccacatggggccgtacccgtcccggcagccggcttcccccaggggaccgatgggaagaacggttttcttgttcctgttgttctggggcatttccgccgttgcgccgttgtctgacaggaacatgacgatcgtgttgccgctgaggcggtggcggtccagggacgcaaggatgcgtcctatgccgcggtccatgatggagatttgggcagcgtaggtggccatgcacctggaaaggtagtccttgcgctctgctgtggccttttcatagccggaaggattgaattttccggccatgcccagcttggcggagggagggacgattccgagctgtttttgtttttccagcctcttggaggcgatggcatgcggagattttccgcggtaggacggcagcattttttctatttcctcccggggggcctgaaggggggtgtgcggggccgtgtaagccacgtagaggaagaagggttttttgcttttggcggcgtcgtcaatgtaggccagggccgtttgggtgatgtcttccgtcatgtagaaatcctccggcaggtcctccggacggagcaattttccgtcttctccgaaggggcggtccggcatgggcttgtaataatccgccgcgcctcccagcagaccgcgggaacggtcgaagccgcggtcccaggggtaggttccccggactttccccagatgccattttccggaaaggtaggtacggtatcccgcttttttcaggagttcagggagggtggggatatccggattcagccgcccgcggtagccggggcgtccgctgtcgtcgtccagcagccctacgtccaccttgtggggctcgcagccggtcatgatggaggcgcgggagggggagcagcgggaagccgtgtagcaccgtgtagccagcatgccctgtgcggcgagggagtccagatggggagtggggatttccgagccgtagcagcccaggtcggaccatcccatgtcgtcagccaggatgaggacgatgttgggcttgtccgccggggagggaacaggggagagcagccagagggccatgcaggccaggagggggaaacttggaatgaagcgcatgggaggaacggggtgtatgataaagcaggcaggcccgcggacggatcctgcccggaggctggaaaaggaaagctgtcttccctgttggcccggacagcttgcgcgaccgggaattcctccggaaaaagccgggtgggcggatatggtgcgccggaaaaaatgcgtctgctaccaccacaggacggcgcagagcagaatggcggctccgtaggccatgccgcccaggcagaggggcgtccaccaggccggtttggagcagatcttgttcaccatgtcacggtacaggtagggtttgcctatccagaggagggaaaggaaaatgacaatgtagcaccagatggggatgagcagcctggtgaccgggtcctggaggaaggccgcgctgagaagaggggccgccaccatcaggccgaagatgccgagcgcccgcggaaagagcaggtttttcacctgggtgaccatcagcaccaggaaaacgggacacgcaagctggagcagccagcggatgccttcaaactccgccagccctacccggaaataactcagcacgcccagcccttccggagccaccagcaggaagaaccagaacaggccgatggccagcagaacctgggccagcaggtggttgcgcggggaggccagcagaaaggtctgcacctgctgcctttttaccagtgcgtaaaggtgaaccagcagcagaacggcgcccaggacatatcccgccacgggcagcggtatcattccatcatacggatgcaggaagggagcgtgctggttcatctgaacgctaaccttaatgattatcccggcttcgtaaaggcgaatcagcgggagagagaagaaaattccatcggattcccggcgtcaggccgctggaattcccccgcagccggcggaggaacgcaggctcaggagccttgggtgactttttcaaacgtgggatcctccacaggggtgattttcccgtccgcgtaaagcaccatgatgcctccctgatggcgttccagggccgggaccacgatttcctcaaagtcctgttccgtgatgacgctgcgcccgtcaagcggaatgccgtcgctgatccagggcttgccgcgcagggcctgcccgcgcgccacgttcatggggcgtcccttccggttgtccagccagctggtgtaggaaatggtgtccgggctggcgggaaggatggaatcttccgccgcgaggatttccggccggttgtcattcttgcagcggaaggtgtccggaagcatgttcggctccttgtcgttccgggcgatcaggtcgggctgttctgcgttcacgatgggagccagggcgtcccaccagttccggcattccctggcggtcaaaaggctgtccttcatgccgctggagggcagcttcccgccgttctggcctgcgaattccttgccccagtcgctgatgcggcgcaggttgtccgtgcagcgcgttctggccgcagtctccgtagcatgggaataaatgctgtaggatacgccagccagcagggcgatgatggcgatgaccacgagaacttcaataagcgtgaaacctttgctgcgtgaggggagtaagcgggctttcatgatttcccgccattatgcacgattgccgccgcttgaaaaggcagaaactgcgccctggggcgaaaagcgccggacggagctccggaaacgaaaagggccggtcccgtgaaggaccggcccgcaggaaaggaaatggctggattgcgcttacttggcggaagtgaccagcgcggcgaaggattccggcttcagggaagcgccgcccaccagggcgccgtcaatgtccggctgggccatgagttccaccacgttttccggctttacggaaccgccgtactggatgcgcaccctggcggcggtgtccgcgccgaagacgtcggaaatgaccttgcggatgaaggcgtgggcttcctgcgcttccttggaggtggcggtcaggccggtgccgatggcccagacgggttcataggcgatgaccaggttggccacttcttccggggtgagatccttgagaccgcccttgagctggatttccagcacgggttccagaatgccgcccaggcgttcatccttcgtttcaccgatgcagaaaatcggggtgatgccggcggcgatggccttcttgatcttggcgttgatgatggcgtccgtttctccgaagtactggcggcgttcgctgtggccgagcacgacgtacttgagacccagttcattcagcatgctggtggagatttccccggtgtaggctccgttgtcatactgggagacgttctgggcgcctacggcagtgcaggagcagccgttcagggcgttcagcacggaggggatggtggtgaaggggggaatgacgaccacgtcgcatgcgacgtcttttcccttaacgaggtttttgaagctttcgatgaattgggcgccttcggcggggccgatgttcatcttccagttggcggcaatgatgggtttgcgggacatagtggaatgagattaatcaggagcacgcattgttgccaaattggggccgaggtcaagcacagatcaaaagggccgcatacgcgccgtccgatttttcctcatggggaaggatgagtttttcctcctttagggtccattccgggtggttttgcagaaaatccctgaccaccaggccgtcttcctccgcgtcaatggaacaggtggaataaaccagcctgccgcccggcttgacggcctgggaggcgttttcaagaatgctcctctggagggcggccaggcggcggatttcctgcggggtcaggcgccagcgcacgtccacgcggcgctggatgaccccggtgttggaacagggcacgtccagaagcacggcgtcaaaacggcgttcccattccggagggcaggggagggaccagtccgcctgcgccgtccggacggaggaggaaccctgcctgtccaggttttccttcaaggtgggcagacggtgttcatggaggtccgtggcggtcaggcgcgccttgcctccggtagcggcgatgatggcggcggatttgccgccgggggcggcgcaggcgtccaggatttcctcgccgggccggggagccagcaggtcgatggcgtagcgggtggaggggtccgccacgtaaagggagcccgctttgatctcttccagcggcagggcgccgtctacggagaaccagccgggagcgcggtccagcggagccagggaggctggcatgccgttcacggggaccagcggattggcgcggacgtacaggcgcggcgtggtgttgttccagtggagcagggcgcggaccgtttgcggctccatctgctgcgtccaccgctgcaccaaccacgccggggtggaataaagaacgggaagcggcagtttttcccgttcctccaggatggctttctcccgccgaagcgcgttgcgcaggatggcgttgacaagcccccgcaggcgtgcgggcgcaagattgacggtttcatacacggcggcgtggtctgccatccccagcaggaaaagctggcacagccccagttggaggataaggcgcatttccaggtccagcctgcctttccgcagggagtcgatcacatggtccagccaggtctggttgcgcagcacgccgaagacgagggcctgcaccagatgcctgtccgccgtggaaagcgcagcccgcgaacattcccggtccacgagggtttccgcaaaggagcggccttcatgccagcgcatcaggcaggtcagggctgtctggcgggaggtggggggattgttcttcaccggggaactctacatgcggaacgttcaagtttcaacctgcaaaagcaagcggcggaaaaagggcggttttccggggttgttccggcttttgcctgtcttttctggggcttcccgcttccttcctgtaaatggcctggagcctcttcaactggtctttccttgtttccgccagattgtgcctttcctccgggtcgctgctgatttgaaaaaggagccacttgtcctgcttgtgcgtgagcttccagccgtcccccgtgatgaccgtgtggtccaccactacgtaatcgcgctggctggaaggtttgccgaaaagcatgtttttataggaaacggaatccttgccttccggcatgcccactcccgccagctcggcaaaggtggccatatggtcgtagttggctaccaggctgcggcaaaccttcccgtgcggcacggtcccgggccaggagacgatgaggggaacgcggatgcccccttcatggttggtccatttcagcccggccaggttgaccatggcattcttttggccgatgagcccgcggctgccgcggaaaacgtccagcagctccccggtgccgtccagaacgccgccgtggcagttgaggccgcggccccgctccttgtccgtgcggtagtaaagttcatgcccgttgtcggagctgaaaacgatgatggtgcgcttctccagtcccagtttgtgcacctgggccaggatggcgcccacctgcctgtccagcttgtccaccatggaggcgtattcctccgccgccccggcgcattccctgttgccgcccgcagcgcccgcataggcttggcggatggctggatgaccggcatacttgttctctgcggggggaatatccaccgggccgtggggcaggttggtggagaaaaggatgaacatgggcctgttccggttttcctccatgaacttgagggtttccgccagcatggcgtccggagcgtacgtcacttttccgtcccggtttcctctccgtttttccgtggctcccggcccgtaaatctccggcgtcttgccgccgtcggcatgcgtgttgcccggcaggggaaggcgttcgccgtctttccagaggaaggagggataatagccgtgggcccgctgatggtccatgtatcccacgtaacggtcccatccgtgccttttcaactctccgtgccaggtggtgaagccccactccagctttccgaactggcccgtgacgtatcctgcctttttcagcagttccggaaggaaaacctctcccccggaaggcttgatgcgggccgccctggccgctttcttttccagttcctcgttggaccagccttgttgttccgccgtgatgaccaggccgccgtttgtctgggtgtaggagcgggagtggctgtcatgcacgcccatgagcagggaggcgcgcgccgggcagcagtattggctgctgtagcaccgggtgaacatgatgccctgtttggccaggcggtcgatgttgggcgttttcacgatctcctggccgtagcagcccagcatgcccatgcccaggtcatccgcataaatcagaatgatgttgggcctggaagcggcagtggccgggaccggacagaacgccagcgctgaaacaactgccagaaatgtacataaaataaatcccatcacgggcagtacgtggaaaaggaaaggattgttgcaaagaaaaaaccgtccggaactggtattccggacggttgattgaaaacgttgtgttgcgggggcttagttgccgtagggcttgttgacgcggctgaactgcttcaggcgcaatccattgaggtggatgaagccttccgcgtcgtcctggttgtacagttcctcatggccgccttccatcgtggcgatttcttcggaatacagggactgcagggaacggcgtccggcgtacatgacgttgcccttgtaaagcttcaggcgcacttccccgttgacggtttcctgggacttggtcaccagagcctggatggcttcacgttccggcgcaaaccagaagccgttgtaaaccagcgtggcgtattccggaatgagggaatcgcgcaccttctgcacttcacggtcaatggtgatggtttcaatgtcgcggtgggccgccagcaggatggtgccgccgggggtttcataaatgccgcggcttttcatgccgacgaagcggttttccacaatgtccacgcggccgatgccgtgcttgccgcccagggcgttcagcacgtacatgacgcccagcgggctgagcagggtatagccgtcgcgttcccccttcggggtgacgttcagttctttcagcagcgtgtcaaggccgtcgtacttgatgccgatggcatcgcccttttcatacaggatctgaatgtattcggcctggtccggagcgtcttccggggaaacggaaagcttgtacatctcacggtcggcgggggtggtgccgtcgtaccaggtatcttccagcatccctgcttcaaaggaaatgtggagcaggttgcggtccatggaataaggctttttcagcgactggcggatcgggatgccgtgggattccgcgtaggcgatcatttccgtacggcccgggaactgcttgcggaattcggggtcgcgccagggggcgatgaccttgatgttcggggccagggcattgacggccagttcaaagcgcacctggtcgttccccttgccggtggcgccgtgggcgatggcgtccgctccttcacggatggccaggtccaccatgtccttggaaatgcaggggcgcgcgatggaggtgcccagcaggtagcggccttcgtaaagggcgttggcctgcatcatggggaagatgtagttggcggcgaagtcttccttgaggtcgccgatgaagcacttggaggctcccgtagccagggccttggcttccaggccgtccagttcttccgcctggcctacgtctgcgcagtaggcgatgatttcggcattgtatttttccttgagccacttcagaagaacagaggtgtcaaggccgccagagtatgcaactacgattttcatgtacgtcaatgattagtgtgcggcggcatgatgccccattccctctccggaggaaaggacaaaatcatgtttaaccacgggctttttcccggaactgcccggagcggcttccccgggatggttcctgaacaaaaacaagtggaggttcgtcaggattcgttctccgaataagcccggaaagctgcttttaattctttttcttgcctcctctatacagaaactccgtttccttggcacgtcccaacgtccggtccaccagtccgttgatctccttgtcttcgtatcccgccatccggatgtactggcgcgcttctgccgtacggccgggaaaatacctcgccagaatgcggatcaatctttcttccagccattcctcgataatacgtttcatactcctgttcctgtcctgggccacgatgaactggtcttcccagccaaaaacacgtccctcccggtgcaccttccacgcgttctttgccccttccttccatcgcttcctcagcttttcttcggaagtcgcctggtgctcctcccggaatccttttaaaattaccgctgcgtacaacgcgctgaactttccgagttccctccggtccacgttcatgcgtctggcagattcttctcttacaatccgggccacgcacgtaacggccacccttttcatagctaaatcttgcgtccttcttgcatactcccacgggtgttctccgctgaagtccacctggtagaacggcgccgccgtcaccagaccgcacaagtggtacagttctcggcactgtcctcctcccaggtcatcaatatggatcccgcaatggatttgaaacagacgggccgcgcacaggtagaacagttccagctcgttctttttgagcatttcctgcaggtgccagtgaggggagtacggttccttcaccggcaggtatacccatcccatctccgccagcatgcggtagcccggatactcgcgggactgggccgtttccggataggccagggaaaggcgtacccctgggatcgtcgtggctccctgcgccggggatgtgatgccggagcaaagcaggataagcgggaggaaaaggtggagtattttcatcattattgtggtaatcattatttgttgtcttgcggggaaaacacatgggttccctgctgggagtcgcgttccacctggcattcaaatttggaaatccatgcatggacggcttttctggtcctggggtccgtccaccggaccttgaaactctgcgtcacggtattgagcatgtagacatcgcggtgctgaatagactgcacgtaacgtttgcatgcccaatcccatttctgttccggggcatccggactcaatccggctttcacctcattcatcgtctttttccatgctatggtgtcaatgaccctgttgccgggatcaatctgggaccatgtttctccgggccggtgtcttcctcccaggggagggaaggttttgtcgctggcgtccgcatctttttcaatcacatggatattcttgaaattgacgttcgtgggatggatcgtcaattccagctgggcggaagctccgggtttgccccggtcctgtgcctgatccgtggggaagccgggaaacttcgcagcgtccgcaatcattcccctgccgcctccttcctttttcctgtgcttcccggtgatgtgcgtagggaggcatacctccagtttgagcggtttatcgggcatctgctgcgttttcgaacaatatgcccagactttgattctgttgttatttcctaatgttttgggactcaaatcgtcattgatgactaatgttacttctcgttctccatctgtcattccctcaaggctgcccaaatgcgctccatcttccagagtccaccgaatgtccttattctctccgataagcgcctgctttcctgtcaacgtcaaggtaaccctttcgcccatgcccacgcaggttctttttttatcttcgtcctcgtccggattctgtccttcttccttggcgatgtagtagtccgcggaacattcttccgttttcgattcaatcttcagcccctgcatgggttcctcctcttccgccgtcacacggcaggggcatgcaagaagtgcgccaaagacgcagatcttcataacaaccttgtttttcaacaacattcttgaaaaagttttccaaaaatacgattgaagtcaagggaattcccattttatgctgatgccttgcagatatgatcccgttccgccggggaagaaatgattaggaagagttaaataatcgactgcttccgttccgccggaaacgcctgtgaggcttttcctgatggtgccgcttgcggaagaaacaggcgttcaagccgatgtgcggaagctgccaaaaaggacggatgacattgaaaacggcttgaatttgatgaaattgaaaaaaagcgcttgatttttcatccccggccctctacttattccgccgaacttatggctaagaagagctggatcgcaagagacaagaaaaaggctgacaccgtcaagcgctacgcggaactgcgtacgcaattgaaggctgagaaggattatatcggtttaaccatgctgccccgcaatgcaagcccgacccgtacggtcaaccgctgccttgtttccggccgccgccgcgcatttatccgccgtttcaagctttcccgtatttccttccgcgaactggccaacgccggcatgatccccggtgtgaccaagtccagctggtaagggcagggaaaggttgcagccttataaagattttgacgctaggctgatttttatttagcctagcgttttactatgcccatatacgagtatatttccgaaaaccctgacgaccccggccagtcctgcccggtgtgccgccgcggttttgaattgcggcggccggtggatcgtgcgccgcttgaaaagtgcctggtgtgcaagcatccggtgcgcaaggtcatcagccggatcaatgtgccggaggcgaccaagcctctttccgtttccgacgccaaggcagccgggttcaccgtgctggagcgccgggacaagggcgtttatgaaaaactgtaacacaaaagccgggaaatattccggcctcctttcccgtatactacttgaaacagaatgaatgatccggaccctctgagtattcttgcggccttcggggccgctgaagcgcccgacgctgttccggcgctgggtggaatgacgctggcgattgccggctttatcctttttttactgctgaacgcgttttttgtggcggccgagttcgccctgatgaaggttcgcgaaagccagctgcacgccggggatggcgttccggcgcgtacccgtaggaagctggcccgggcacggaaggcggtcaagcaccttgacctgtatctggccgcctgccaggcgggcattaccctttcttctctggcgctgggatttctgggcacgtttttcgtggcggagctgacggctcccttccttgtttccctggggctgggcggtaaggttcccgtttacggcattgccctggccgttacgtttattttctttgcctgctgccaggttatttttggggagtttattcccaaggccatggcggtgcgccatccggacagggccgctctggcgacggtccccctgctgcatttcttttacacggtgttcaaatatacgggcattcttggcctgacggacggaattgcccggtttgtgctgaagtacctgctgggtatcgatccccgctccacggcctgcacggttcacagcacggatgaactgatgtacctggtggaggaaagcgaacgttcccgagagttgacgaagcaggaggcggagatctccaagaatgcccttgaactgaacgacatgtgcgtcaaggacgtgatgacgccgcgttccgaagtggacgtgatggatttgacggccccctttgaggagaactgggaacttgcccggaagtcccgccatacccgtttccccctggtggagggcgaccatctggacgaggtgaagggctgggtgcacgtcaaggatctgctcaagctggtagggcaggaaaatccggaccttagaaacgtgcggcgtgagttgcgcgtggtgccggatacgatgcctctggacagccttctgacgttcttcctgaaagagcatgcccattttgccctggtggtggatgagtttggtgattccatcggcctggtgttcctggacgatgtgctggaacagatcgtgggggacgacattcaggatgagtttgaccaggaggaaatgcgggaattcgtcaagaccggcaaggatacgtatgccgtgaacggagccgttaccctgtttgacctggcggattacctgcctgaaatggacctggattgcccgggcgtcaccacgctgggcggttacgtgatcagccggctgggttacattccggaagaaggggaggaattgcggattggccgctaccgggccgtagtgacggggtcggacggcagaagaatcacgcagattctgctgacccgccttccggaagaacaggaggaggaatgaggccatgacggaaaagtcacacccggatatgagttttgaaagggaggcccgttcctccggttttctttatgtggccggggtggatgaagccggccgcggccctttggccggccctgtggtggccggggccgtcattctgcctgaactgccggaggaactgtccgggttgaatgattccaagcaattgaccgcggctaagagggaacgcctgttcctggctctgctggattgcgaacaggtggcctgctccgtgggggtggcttccgtggaggaaatagaccgtctcaacatcctgaaagccactcatctggccatggcgcgcgccgtggaagggctggccccgcatgcggatttctgcctggtggacgggctgcccgtcaaggggcttcccgttccgcaccgcgctatcgtgaagggagacggcaggagcctttccattgccgccgccagcgtgctggccaaggtgacgagggaccgcatgatgacggaggcggatgcctcctatccgcagtacggttttgcaaaacacaagggatatggcacgaaagcccacatggaagccctgcggaggcatgggccctgtccgcttcatcgccgctcgtttgcgccggtttcacaaatggaactgtccattcctgaataggaaggagcgggatacggcatggctgggaatgtacggggaactggcagcggcctctttcctgcgtggggaagggttttccgttttaaggaggaattggcgtcccgtcaggggcggggaactggacctcgtgtgccgggacgggaactgcctggtttttgtggaagtgaaaacccgtacgggaaacagttacgggggagcccgccgcgccgtggacgcccgcaaaagggcgctgatacggcggggagcggcggaatggctccgccagcttccggaaccggttccctcccgttacgatattgtggaagtcctgtaccgggaggggaagcccccggaattcaggcgtatacgcggcgcgttcggggagaaggatttggacgcctcatgaaaagcgccgcaggcgcagggcgttcagaatgacggatacggagctcaggcacatggcccctgccgcaataacgggagaaagcaggatgccccagaagggatagaggatgccggcggctatggggatgcccagagcgttgtacacgaaggcgaaacccaggttggatttcatgtttttcacggtggcggtggaaagggcgaaagccttggaaatcaccagcaggttccccttcaccagcgtgacgccgcagctctgcatggctacgtccgatcccgttcccatggcgatgcccacatccgcttccgccagtgcgggagcgtcgttaacgccgtcccccgccatggcgaccacggcgttcccgcttttcagggaggcgatgagcgcctgcttgtccgccggtgtcattcctccgtggaattcggaaatgcccagctccctcgccacggcttccaccgtcgcgggcgcgtccccggaggcaatgatgatgcggatgccgcgcgcagtaaggtccgccagggcctggcgcgtgttttcccggattttatccgccagggagaaggctcccgccgcctggccgtccaccgcggcaaagacggtaacgcggccctgcctccgctgttcttccacccacggagccagggaggagatgtctacgccccgcttctgcatcatgtctgcggtgcctacgcaaaccttgctgccctggaaagtcccggccacgccgccgcccgggaaggactggaagtcctcaatgggcgacagggtgagcttttcctccgccgccttctggaggaaggcgcgcgcgatggggtgttcgctgttctgctccagagaggcgcaccgggcgagcagcgcgtccatattcacgttgttccccgtggttacgttgaccagggatggcctgccttccgtgagggtgcctgtcttgtccatcaccaggatattgaccttgtgcatggtttccagagcggccgcgtcccggaaaaggatgcccagggaggccgcctttccggaagccaccatcatggacatgggagtagctaggccaagcgcgcaggggcaggctacgatcaggacggcgacggcgttcaccagcccgtgcggccaggatggctgcggcccccagaatccccaggcgaaaaacgtgagaacggcaatgagcaccaccgcaagcacaaagtagcgcgccaccttgtccgccagcctctgcatgggggccttggtccgctgggcctgggccaccaggttgacgatacgcgccaggacggtgtcattccccacgttctgcgccgtcatggtgaaggtgcctgtggtgttcagcgtggcgccgatcagcttgtcgccgggaacgtgggagacgggaatgggttctccggtcagcatggactcgtctacatcgcttcccccgtccttcaggacgccgtctaccggaatcttttctcccggtttcactctcagcacgtcgccggtctgcacgtccttcaggggaatgtcgctttccaccccgttggggagtaccagatgggcggtggcgggggccagattcatcagggccctgatggcttccgccgtacgggatctggctttcagttccagcacctggcccagaaggctgagggagatgatgatggccgccgcctcataataaacgggaacatgcccgtcatgggtaaaaacggcgggaaaccagccgggcacgatggtagcggccaggctgtacagaaaggcgatggaggttccggcgccgatcagcgtccacatgttgggattacgggtcttgatggaatcccatccccggaccaggagcggctcccccgcccacaggaccacgggtatggccaggaacagttccacccagttctggactccggcgttcatccagcgcgcaagatggccgcccatggaaataatgaagatcaggacgacgaaaggcagggaaaaataaaaacgcctgcggaagtcattcagctccgtatcgtcccgggcgtttgcggaagggagcagcggttcaagcgtcatgccgcagatggggcatgctccgggatgatcctgccggatttgagggtgcatgggacaggtgtacaccgtaccgggggcggcggccgcagactccatggcggaggaatggtccatgtcttcatggtggtgcatgggcatgttcatgccgtgtccggcgtccggagggtgggcaagagcttcttccggcgctgccgtgaatttatcccggcaggaacggctgcagaaaaaataggttttcccctgatagccggccttccagggaatatcttccccgacttgcgctccgcagacggggtccgtgtgtccggaagctccatgccgggcatgcgggctgttggtcatatccatacggaaagtgagacaattccgggaccctttccgttccgggacagccatgattggaaaaaccgcggaaacggcttcaagcccgcatttccccatgcgggcacagattgcgcctgtctattatatatagtgcaggaggaaaaatcattccgccctgagcgccagaatggcttccatgaaatcctggggaatatccatgcgggccagttcgtcctgaagaatgacgccgttggccccggcgtccagcatgcggcgcgcgtcttccacggtgcggatgcctcctgcggccaggacggtgacggaggcgggaatttcttcaatgagtttttccgtaaccgccggattggcctggagggtatgcggatccgcattgttgatgcagacgaattccgcttccaggtccatggcggtttcaagctcattcagggtatggacttccatcatcacgtccagtcccagcccggaggccatgcggtacaggtcttccaggtccttttccggcagggcggccgccaccaggttgacggcgtccgctcccgagacgatagcctggcagatcatggcgggatggatgaaaacgtcgcgcgccatgacggggacagtgctgattctggaaatggtggaaaccatgtcccaggaaccgccgtatacctccggttccacggcgatggaaatgccctgcgcgccgccctggatgaacatgccgtacaggtggcggaggtcctggtttgactcccggaggttgaggacgggatggaccctggacatttccgggacgacggaaagacggttttccccaaggtccaccgaggtgcggaatcccgcatagtcattcctctggatggcggaggcccgcaatttcccttccaggggaaggatctttttcaagtcggcgcgtttgcgctccagaatgctgtttaaataatccatatgttactttttgggcaggaaataggaacgttgcttttcggaaatggggaggccggcctgttccatgacgcacagcatgtcctcccaaacctttcgtttttctgaaatatcctccgtgcggaggaggtagctgggattgtaagtaacgcgcacaggcgtgtcgaaagccgtgtggaacgtccccctcagggcggaaagcggcgtctctccggattggaggatgcccctggccgcgatggcgcccagggctaccaccactttcgggcgcaccagcatgatttcctcccggagaatggggagggacacctctatctcccggtccgtgggcggccggttgttggtaagctggcgggggagggcggggcggtacttgaccagatgggtcaggtaaatgtccgtacgggaaagccccatggctttcagcatggcgtccagcttctgtccggaggggccggccagggggatgccctgcttttcttcatacaggccgggggcgtccgtgaccatcatgatgtccgccctgggactgccggaggaaaagacgggcgtgtcccgcagggactccatactccggagcggcggccagttgacgaccagttcccggagggaggacagtttctcttcctccgtttcaccttccagggcaaaggaaatatggcggggcagcgcggcttcctcctccgttctgcccggctgcactccgttgaggatgtcccggagttcgttgccgaaggaaacttcatccacggagtccggcggctggcctggaatttccggcggcggctgcgtttctccggaaacagagggggcggaaacggaagagggggcttctcccctggcgatccgccgtgcgtccatgacccatttcctcaagaccgttctggcctcctccgtgacggcagccttctcaacgccccgggataacagggcgcgcaggtagtccagcgtgaggtgttggggcaggccggcagacatgttcgttccggagtgtaatctatttccggagggatgcaacagcccattgggtgtgcgcccggccgccgggagcaggaggcttggcgtcatctgaagagcgttgcaggaaagaggggaaagagaaaaaaggaagggcggctatgaaatttcccccctcttgtccatgaatgccgttcaacggggcaacgcccgactgcaagcgggcatgcttgttccggggccgttttgccggaagcggggagttgattcatttgcctttcgaatttccctttcccgtcagggttgaagcttcgttttccgtccaaccgggcttttccggttcccgctccggaaaaattacaggagaaaacggaaggattccttttcagcgcagagcgggctgttccccgcatctttctttttcttggcatggaagtttctccagaatttgaaaaactgctgcaagacgggttacgggatgttttttcaatcaggcctgcatgcctttttttctatagctttcccatggccggagcatgccccggtaaaaatcccgtgtcccgaatccttattgccgggaaacgttcttcccaacctcttcccgaaccctgcattgcggcatattgggaagcaggaagggcgcagataaggaaacgggaaaggaaaaattcacgtggaagcctgaacagcaaagggaaattcgttcaaggggagacgcgatttttccatccatgacggccttccggaatttggcccattgaacttttttagggaatcttttgaaggattgaggtcgattttctcttatatcatctttatagtaagcaagatgtattaaaaataaaaaagtgtgtcgtgatgtgatagaaaaagatgtttcgtgaagtatattatttgtcatgatatgacaaaaatgcggcatgttttatatattgcttatttttagcgttttatattaataggttttccttgtttggaagggggtcggtgaaaaaaaaggattgccaaggcagaaattatttcgtacccaagagccgccgttgccgatttttcggcttccgcacatggcctgaaggttctgccggagtgactgccatgtgtatggcgcctaacctcataccgcatgaatttaagaataattgccaccctgtcttgtgccgtcgcggccatgtttgtcagcagctgctcgacaaacggagctgtaaccggcatggggaaatccagtagtgacgcccttgttttggcccgtgtaggtgaaaatgcccagggatttgttcagcccctggcgccgagccgttcggcagtgccttcttccaagctccccaaactggggcgcgacaaacacaagatgccgttttaccaccccgcccagcgcacccgtgtagtacgcaccacggcttatacccattccgaacgtgaccacctggcctacggaccccggaatgccgttggcacgacgctgaaatacacttcttccgtgcgcagcgccgctgcggactggtccgtttaccctctgggaacaaccttccgcatcaaggggcagccctatctctacgtcgttgacgattacgggagcgccctggtcgggaccggaaccattgacatttaccagcctaacaagaagctgatgaaggaatggggccgccgctatgtggaactgaccatcgtccgctggggagaccccgccaacagtctggaagtgctcggcagccgccgcggctacaggcactgccgcgccatgtatgcggccctgcagcaccgcgtgtccaaggggctttacgccaaggctgactgaccggattcctgaaccctttaacccgggcgccgccattcatcacatggcggcgcttttttattttccggcgtgcgtgcaggatggtaatctggcggcatggatacgaaaaaacgggcttccattgtccgggaggaactcatgtccctgtatgggaaccctcccattcccctggcgcaccgcgacgcctacaccctgctggtggcggttcttctgtccgcccagtgcacggacaagcgcgtaaacctggtgaccccggccctgttcgccctggcttccactccggaggaaatggcccggcaggatgtggaagcggtccgggaaatcgtgcggccctgcggcctctcggaaaggaaggcgtccgccatcgtgaacctcagccgcatcctggtggaaaaataccaggggcaggttccctgcgactttgcggccctggaatcccttcctggggtggggcataaaacggcctccgtcgtcatgacccaggccttcggcgttcctgcctttccggtggatacgcacattttccgcctttcccggctgtgggggctgagcaaggggaaaacggtggaagccgtggaacgtgacttgaaaagccttttccctgaaaattcatggggggatcttcatttgcgcatcgtcttgtacgggcgtgaatactgctctgcgcggggttgcggagggcgctgtccgatctgcagccggctggcccgggaagacggttccgcgggtgtctgaatttttgccagggcccgaaatgaatgcttgcaagtctgaatttgcatgctttaatacaccagtatcttttcgaacaaccatataacttaaattatgaagaacctttttagactgggtttccgtttcgccgcatttgcttccgtcctgatggccgcgttttctacatccgcctttgctcaggaagctgccgaagccgctgttccgcaggaacagaccatgcttgacaaatggatcatcgccggtggttggaccatgatcccgattatgctggtggaagccttcatcgttttcctggtaatctacaacatggtggctctgaaaaaggaaaaattctgtccggaagacctcaaggtcaccctgctgcagctgatggccgaatgccgcatccgctccgccattgaagtggcagccggcagccccacctatctgggccgcctggttgcgtatgccctgccgaatgtggacgccacccgtccggaagaccttggcaaggacgccattgaagacgccgtagccgactttacggccaatgaaagccgttccgtattcaaatggattaacatgctggccctttgcgcgcagatttcccccatgctcggcctcttcggtacggtgcaggggatggtgggcgcgttcggcacgctgtcaagcgccggacaggcagaccccacccagcttgccggtgacatctccgtggctcttctgacgaccttctggggcttgatcaacgccattatcgccacgccgttcttcttcttccagaagggcatcgccaacgcccatattgccgaatgcgtaggcaccgtgcaggaaatggtgaacacctccatcaacgtggtgaacgccgaagcccagcttgcccgcattcccgaaggcctggcctgatcgccgggaaagacggtccggtccggaagtttccgcccaggcggagccgggccggagaatctcaaccaaatgtagcttatgggtaagaaaaaagccaatgtagcggccgacgaagagagcggggaaatggatatgtcccccatgatcgacatggttttcctcctgttgatcttcttcgtggtgaacgctacggccattaccgttaaaaaggataagaacattcaaatgcccacggccagcagttccggtgaagtgaaatccgccaacggctgcatcgtggtgaatgtgtacggtgaaggggatggaaagcgtcccgccggcatggaccccaacgttcgctgggcttccgatgtcagtgcgccgctcaactctccggatgaactgaaggaatatatcaaaaaccttgcggaacgcttcaaggacaagcaggactttgaaacccgcctgtatctgcgcggcgaccagaaggccctgttcaaaggctcccgggaagtgattcgcgtggctgcggaatgtggcgtggtcaaggtgatctttgccgtattgcctgctaaaaattcctctgctgcaaacaaggccgaataacattacgcgctatggcaagacataaaaaattggagatggttgaggatgaagatcccaagctggatatttcctccctcatcgacgtgtgcttccttctgttgatttacttcattgtggcgacctccctgattcaggaacgcaagctggacatgtccatgccggggcaatccgtgagcgataccgcctcccagattgaaccggcgctgatccgcatcatcaaggacggcaccatttactggggcaaggacaacagcctgatgattgacaatgacatgaacaaccataacctggcgaccctcgtgcagcagctggaagccaagaaacaggaagccagcgccgtaggcaccaagccggtagttcagttgtgggtggagggcgatgttccccaccagcgcgtcattgacgtcatgaacgctttgacggaagcaggaattaccacggtggccctgaccgacctcaaggacgactaagccattcacggatggaccgtgttattgatgttcagcttccctgcaagagtgtggaagtggcccgctgtctttttttcttatggtccggtcaaatcatgcagcccggtggggagcaatcctgatcgtcttctcgaacgccgttctggcattaccgttgaaggcgtctcaggaatcgggcgcctgccgcagcatcccggtttccgagacggcaggatgtagtgcgcggcggggagaggaaggccttcagatgcaggaagatgaacattccggagaaatcaggtcctccttcggcaacatcgtgatcaatgtgtatgacaaaaaggaggacaggcgtccggaaggtattgattccagtatccgctggggatccggctcccatgagcctctccattccccggaagaactaaagaaacatatcaagaagcaggcagaacagctgagggcaaagggctgtaaggagcctttcctctatctgcgcggtgaccggaaggctctcttcacggattcccgcgaagttatacaggttgccgcagaatgcaatgtgaagagggttcgtttttccggacctcctgttgcagcagttccaggcattcctgaaaggccgcagagcgggacggtttcatcaatgccgtccgcttccatttttcttcttccgcatgctctcttttacggtaacgggaatggccttttttatcctctggtggaggagaaagggagcctgggggttatcgtcgagtggctgaaaaacaaaaagcggagcgcagggagggcgggaggcagggtagtggttcagttaatggtggctggagatgttcccaatcagcgcgccgcagctgtcatggatgttttgatgagagccgggatggactcagtggtcctgaaaactttcaaagatagttgagagaggggcgttcatttcgttaatggccggaatttgctccggctcggaatgccggatctttttttgaaagagcaggattctcagagataaaaaggcctttttggttccaaacccaatcctcccttaagggaacgcgagcaggaagaactttcttgcaaggatgactaaaaatacagaactttctgctttagagtttgcagcatcctgttagaatgacgcaatccattacagataggtgcattccgtgcatttgcacagatattgtacctgttctattatctcttctgtttcaacgaattttaaacacatgatcaaatcaaactatactactgcactggctgcaggcctggtttccgtggtgagcattggggcggcgctcccgtccagtgcccagcatggcccgcgcgattaccagcgcacggccctgaccgccatgaaggaaggcaagtggcaggaagccctggatgccgtggaccgctgcatccgcgtttatgaaccccgtatcaagacgctggggctggatgacggcttcggctggttctattaccagaagggcgtctgcctggcccaattgaagcaatacaaggaagctgtggaagcgttcaaggcgtgttacaccaagttcccgagcgccaagaaccagctcgtgaaaatggccctgttccgcgagggggaaaactattgccgccttggggattttgccaagggcgcggagctgctagagaaattcctgaaggaataccgcagcgaccctgtagcccggaatgtcaatgccggtgaagtgcagggactgctggcccagtgttatttcaagatggatccgcccgcctttgagaaagggctggaaaaccttacctcctgcgtcacctcccgctacaaggggcgccgcattacggatgccgtcatcaccaacggcttcctggcgatggtggatgccgccatcaagaccggcaaatgccaggaaacggtgaaatttgtggaagcccatccttccgtgatgaacatcagccccacccgcgtggcgctgtacgctccccggctggtgagctacattgcggaagtgctggaaaaatcccgcgcccttctccaggaaggaaagcagaaggagtctgaagactacgcctccctggcaatggtgctgatgggcctcctgcccgaccaggccggagtgctggcggacgccaaccattccctggaccgcctgggacgcgccaacggcgccgtgcccggcgtgacggacctctcccatacgctggacaggacgaaggtgaccgccctgattgaccagttcaacaagatgaaggaggaagggaaggtcatggacgccttcacgttcagtttcatgggcaaccaggccctggtgcatggttcccagagggtcgcccgcgccgcttaccagcttatcaatgaatcctatccggacgccccgggcagggaggacaacctctattacctggccatgactacctggcaattgggagaagcggacaagggcggcgagcttgtggcgcagcacctgaaggaattcccgaattccaagtatgcccccatgctgaacaccctgtccctggaaggactgctgaaggacaagaaattcgatctctgcgtccagcaggcggacaaggtcatggagctgcacaaggacgatcccacccacaaattctatgaactggccttgtactgcaaaggcgcctccctgttcaacctgggggctgcggacgccgcccgctacaaggaagcggtgccggtgctggaacgcttcgtgaaggaataccgtgacagcacctacctgaaaacggccatgtacctgctgggtgaaacctacacgaacctgggcaatacggatgaagccatccaggccttcaccaattacattgcgcgtttcccggacaagaatgacgccaatatggccgccgtgctttatgaccgtgctttcaactacctgaaccgcaagaaccccggagacgaggagcttgccacgaaggatgcgaaggaaatcgtggacaacttcaaggagcaccgcctgtttccgtatgccaacaacctgctggcgaacctgtatgccggcagcaaggagcatgaacaggaagcggaaggctatttcctggcggccctggagtccgccaaaaagctgggcgacaagcgccccgccgcggaagccgtgtacaacctgctcatcaatgccaccaagaaacctctccccgtagaaccgaaggaagccgtggaagcggccaggacggcgcgacgggacgaagtcaagaagtggtatgacgagtactggaagaacagcgaccagcccggcagccgctacagcctccagctggctgccgccgccatggacttcttcaaggacgacaaggagatgtttgaccccgcgtccgtcaagatgcaggaagtcattgtgagggaaggcaagaaggacgatcccaagatgaccgttcttctggaggaagccgtgaactcctacaccaagacgtacatggccggcaatcaggcgctgggccgcaatctggatgccaacgccatgcgcaaccacttctaccggttccccggcgtggacaatgacaaggacaagacgctgagcgccatgctccgcatggccgtcattgcccaaacgcaggaacggtatgaaaaggctcccacggaaacggacgaacagcgtgccgagaaggccgctctggaaggtctggtcaagcagctcttcgtggagctgaagcgggacttcaaaccttccgacctgcctccgtacacgctcgtgaagctgggtgtccacctggccaatacgtcccagccggaagaaagcatcgcctactttgatgaaatcctggacccgtcggaacctgatccggtgcgcaagaaggcccgcatcaacggcatgtccaaataccgcaagaatgcggtcttcgggaaggccgttgctctgggccgcagcaaggataacgccaaggtggaaaccgccatcaagatgatgaaggatgaactcagcaaggaggaatccagcgccaacccggaccgcaaggccatggaagacgcccagtacaacctggtcaagttcacctccgcccgccaggactggccgtccgtcattgccgccgccgacaagtaccgcgagaacaagtcctacaagaagaatctgccggaagtcctctacctgcaaggtgaagcctacctgaagcagaacgagctggacaaggccctgatcaacttcatgaacatcacgggcacgtacaagggcctcgtgaagtggtccgctcccgccgtgcttgcacagatggatacgctgtggaagaggaacacgatgtcccagggggcgggcaagcagccgtccgacaggtatatcgcctggaaggccggcagccagtatgtgcaactgctggatactcccgccaaccgcaagaagatgacggcagaagacagtgccctggtcaacgaggtgaaggataaaacggccaagttcggctccgatcccgccgtcagccaggaacgggcggacatcgccgcctatgaagccgccatacgcgccgccaagggccagaagtaacaacaaaaggtttagcaatcaacaatatgaaagcactttcagtaataatggtattggccggcttgtccaccctggttccggctatggctcagaatgcccagaatccccagcgcctgcgcgccagggctgccgctccggccatcaagaatggccgcccgacggatatttacattctttccgccaacggccccatggtccagtttgtggaaagcagggaatcccaggaagtcctccagcagatggccagcgccttcaaaacgctgtacatctttgaaacggatgatttcgtggacgccaaggtggctatggaaaaccggaaataccaggacgcccgcaacaaattccacgccctggtgaacaaatatgcctccacgctttccatcaaggacagcctgtccgcccgggcggccgtctatgaattggagtgcgccatgcgcatgatggactgggctggggtcaaaggcctgctggccaagttccccgtaaggggttccaatctgtctccctccgcccaggatgatctggaggttgccaaaatcatggccctgattccggacaaggactggaacggcgtgaaaagccgtgccgcctctttcctggccaccaagaaaaatgccacccgccttcagcaggcgcggatgaagtatgctcttggggccgccgccatggtggcccaggattggaacaaggctctggattactttgcggaagccctggtgctgctgcacggttccgatgaagaactggcctccgcctgcgtggtgcgttccctggactcctacctgcatatgccggatgtggccaagttcctggaggattccgccgtgacggctgccgtggaagccagaaaacacaatcctgaaaccgtgattcccgacttgcagatgaaggcccgtcccgcgcacgtcaaggaagcggccgcgctgtaccgcctgcatgaactgatgcttccggacaggaagctgccggccaagtacgacgggtttgcggtttcctacaagcatcccgctgccgttgctccggcccagactcccgctcaggcgcctgcccaggccccggcacaggctcccgcccagccggagaaaaagtagtaacgaactgacgcggcgggttttctgccagccgccttccattcaacaaggactgtctccccttcacagggagacagtccttttttgtacttcgttccttcatgagggtaccgcatccctactgtccggaatggctgccgcgccttaggggacgctgcacgttttccggagacattttttcattgggaaaatgcggaagagccgctggcagggagagaacaagagcggttaaaaaacggtgcgtaccgtagggaggggctctcttgagcgcagacttgcggaaaaatatgaggtggcggctgcgggcgcgtgttccacaaagaagaaaagacagttttttgcagatgatgcagtttccgggactttgtgcggagatgcctggaaagccatattccgtatgttttgccctggcgcggggagggagaaacggccttgttgatgatagggggccggaacagggaaaccggtgcggctgttgcggcttccatgactgtttggggtttgcctccccctcaagctggaagccgggaatgaagaattccgcatggacggccagccggccactcaacgccggagagggaacagggggcaggaaggccgttgcgcggcgctgtcctccgttagaaggtatccttttgttggttttctgtccccgtgtacggaacgcccctgcgtccgggaaaaaagctcgtcttttcagaagctttatttttcccgtgcagggtcattccctgttggaggatttggggggtccggaagaatgatgtcaggccacagtgcgccggcgccgcagcatggagagggaaaagccgaacaggcccagggcagcggcagccggttccggcgtgttgaaattgacgcctacgtagccatcccggctcatatccagctcataccctccttccgtccgtacttccagcccttccaggctgatgccgttccctgccagtttgaagtaaaccatgccggacccatccaccggaagagcggccggagttcccatcaattgaaggattacattgttgaataaaagagagccggaggctgtggaattcccctccaggctgaacaggggcttgtcctggctcagggaggccatatccagggtaatggtcaggtcttccagggtgacggaagcgcccggggaaagggatgagccctggatgctgatggaatggaagtttttcaaatcgcttgaaaacgtgaggtccgtctccgccggttggaagaccatggtgttgaagcccgctcctccgtccacgctgccgttcactgttccgccggaataggaaaatacatcgtcgccggaacccatgatcaccgcctggccgctgcctcctgtaatggttcctccttccatgaagatgcagttctccctgtcgctgacaatcctgatgcccacgccgttggagcctgttccctcaatggtgccgctgttggtgatccggatggcttcaaaggcattgccgccgtcggaatcatccaccagaatgccgtaggcctggccgttcgtgttggaattggaagccgtgatggtcccggtattggttacgacgcccccgccgatggcaaggccgtccgcactgccgaaggagtccttggcaataatcgtgccggaattggtcaggtttacgatgtaatccacgtccacgccgtcgccgtccagggtggttgcgtctccggtgccgctgatgacgccgtctttgccgttaaccacggtgaccacgtacttgtcggcctgctggagggcggcgttccagtcccagttcaggccggaacctcccctgccttcaatcctgccgttattgctgatggcggctttcccttctccggtaactccgtgtttcatgccggtgattttccctccgctgttgttggcaaggtccaggccatgggcaaaggtgtcaatgccgtcgtcttccggatcgtaatgcttggccgtgatgccgttttcccccgcagccgtggtttcaatcgtgccgttgttggtcacagtggcgttattgcccagtttgacggctcctttctgaccggcggaaatggtaccgttgttggtgatggtggcggacgtgttgatcatgtagcgcaggtcgatggcctgtttttccgttccggtcatcgtgccggaattggtcaggctgatcaactgtcccgttattccgttttccatgccctggtccaggacaagggcgctttttccggaaatcctgccttcttccattacctcgatctcaagggcggactggatggggtctttcaggttgacggcatttttggcgacgttcaggaatccggttcccgtgacggtcagtttgccctccgtcatgttgacggccttggtctgggcgtcgctgatggtctggtccgcaagggagggcgcggcaagcagaaccgccgcggccagggtcgtggctgtggaataaagatggtgtgccttcatggtgacaagctccgcaggttgtcgggagcgtcgccaccatgccagaacggacgcgcgggagggaaacccgttcgtgcaacaagtttgccacggggaatggcgcgaagcagggaggaaaggaagaaggacgcctaccgcaggacgggggcgcttttcacttcctccgtccatttcctgtacaggtccggggaaatttcggagggcttgatttccgagcgttcgccccagaagacggccgtatgcaggacgggaatgcctgaggcgtccagatggcggtcaatcgccgccttgtgttccagcacggcgtttttttccaggccgtgcaccacgcccatgatctgcgctccgccgaagatgtcccctccggttctccaatagcagtgggtcatgcagatgtggcgtccgcattccgctcccgcccggatttccatgccggcgggaaccgtccagtggaacagtccgttgtatttggtgacggggccgtcgttcgttctggtccgtacgtgttccaaaaaggtggcgaagcggccgatgacctgcttccggtccagctcttccgccgtgcggcagtattcctccggttccaggtcagcctgggcggcgcggagggcccaggggtcttccaccatttcctccggcctgagctgttccttgacggagaggagcaccttccattccagcccggagagggagacggttttcgtttcctgcatgggggccggttccggagtcttgtccccgggccggaggcccctgcggcgcatgtgccccacgcccagcgcaaaaacgccgcgggcgggcagcaggacatagtcgtccgcgccgatgtggcgtttgagtatctcgcagtgttcctccagcgtgccgcagcccacgggcaccttgaccgtggtccagagcctgtattgggcgccgggattggccgcatccgtgttgcggagcaccacgtggcccgtgaaggggtcgtgctccttcatccagtcaaaggccgcatccaggttcttctccggcagggaccatgccaccagggccccctgggcgagcttggtagccagcagcgtctggcgcacgcggcgcaccactccggcttccatcatggctttcaggcgctggatgactaccgggaccgggtggccgcattgctcggaaatggcatggaaggggaagcgccggaagcccttgacacggtcttccgccaccatcaggatgtccgtgttgacgggatcgttcggagaggagggaatgctgttcatgacgggtcaaaaaaaggccgggcgatggtgtcgcccggcccggaaagccggagttggtttagctactgcccggattggtacagcggcttgttgtcgtaccgggcgtcgtaaatggcgaaggattcgcggtgctggttgtggtcgccgcggaagatcagccttccgctgtgctggcgttccagttccatgagcaggctggcgtcttcattcttgaagcgggagagcacctccgagtttacgacgatgaccatgtccccgatggtttccctgtatttctggatgcaggcgtagatctgccgctggatttccacgctcatggtcatcacggatttgacgcggccccggcctccgcagtacgggcacgggtcatgaacggattcccggaggctttcattgagccgctggcgggtcatttccatcaggccgatgggggtgatctgcagtacctgggtcttggccttgtcgcgcttcaggcggtccttcatggctttgtacacggcctgctggtccttcctgtggcgcatgtcgatgaagtccaccaccaccaggccgccgatgttgcgcaggcggagttgtctggcgatttcataggcggcttccaggttggtgtccagaatggtcttgtccaagtccttggtgcccttgttgcgcccggtgttcacgtcaatggcgatcagggcttccgtctcgtcaatcaccaggtagccgccgcagggcaggagcacctggcgctggaaggcttcgttgatttgtttttcaatccccagttcttcaaagatgggcgtgcgcacggggaagtgctggatgtggcgcttggcgcggcgggagatttttcccgcaatggagcgcatgtgctccgtagtttccgcgtcgtcgcagatgatgttgtccacggtgtccgtcagaaagtcccgtgccgtgcgttcgatcaggtcgggttcccggtacacgcagacgggggcggggttggcctcctttttttcctccacgccgtaccattgctccagcagcatggcgaggtcgcggacaaagtggcggtagcgctgtccctgggccaccgtgcgcatgatgatgcccatgccgtccggcacgttcagcttctgcatgatctggcgcaggcgcaggcgttccttggggtcttcaatcttgcgggagatgccgaactggtccgtgaagggcatcaggaccaggtagcgtcccgccagggagacgtttgtggtgacgcgggggcccttggtgccgatcgggcccttggtgacctgcaccatgatttcggagccgatggggtagatgtccggaatgtccttggacgtgattttgcgctgctgcttctttggccgtccttcgcgttcgatttcttccaggctggagtccagcgcggcgggcagagcgtcccagaagtggaggaaggcgttcttttcctggccgatgtccacgaacatggccttgaggcccggttcgatgtttttgacgcggcccttgaagatgccgcctacgatgttgtcttcgccttcgcgctcgatggtgtattcttccagtacgccgttttccagaagggctacgcggcgttcgagtttctcggcattgatgatgatggtggagccttccatgggatcacaggatccgaagccgaaggctcgtttaatttttttaagcatttttgtaaacacggggtgtgaataagctagggtgtgctattgcccgcaatgttcccggagggccgcctcccggcaggagcggctggatttcaagctgtggagatggccggaaaggaatcatgcaggcagatgcgttgatgtgatgcggcagtacggcaggcgcaaggccggagcgctggctccggaggttccgtcttcagtcttccgcgtcagtaacattagtgaagaagtccagttcctgaagggcttttccggtaccttccgcaacggcgctgagcgggtcttccgcaatgtggatgggcaggccggtctgctcatgaaggagctggtccagtccgcgcagcagggcgcctccgccggctagaacgatcccccggtccacgaggtcggcggccagttcgggggggcagcgttccaaagtcgtccgcacggcgtcaacaattgtgttgagttgttccgtgagcgcttcgcgcacttcttctgatcggattgtcactgtcttgggcaggcccgcgaccaggtcgcggcccttgacctcgatagagagttcctggggcaggggataggcggagccgatgcggattttaatgtcctcggcggtgcgttccccgaccataagattgtaggttctcctcatgtaggagataatggcgtcgtccagctcgtccccggcgcagcggacggaacggctgtaaacgatgccggagagggaaataagtgccacttccgtggtgcccccgccgatgtccacgatcatgttgccggcggcttcctggactggaaggcccacgccgatggcggcggccatcggctcctcaatcaggtgcacgcggcgcgctcccgccgcttccgcggattccttgacggccctgcgttccacttccgtaatgccggagggaatggcgatgagcacgcgcggcttgatcaggtaatacctggccgtggcttttttaatgaagtaacggagcatttcctccgtgatgtagaagtcggcgatgacgccgtccttcagcggccggatggccgtgacggagccgggggtgcggcccagcattcgcttggcttcgtcccccacggccagaaccttgtctcccttgacggcgacgaccgagggctctcgcagaacgatgccctggtccttgacgttgaccagcgtgttggcggtgcccaggtcaatgccaatgtcataggagaaaagtttgacaattttctgaaagaaagatgacataaaaaactagtggataaaggcgtagccctgaaacagccggggggaggaacgccacactttttccttttcacgggactgaaagcctggcacccggaccggggctgcgggataatcccgtacaggacgaatcgactatgaaaaaacatgccttccaggtcaagcggaagatgcgggatgacatatgtatttgcattatcagcaaggatgtactatatgaatgaaagatggcggcagtgtttccccgtatatccaaattacattcacctattccatttatgaaagtcactactatcctgacggcggcggcatgcctggctggttctttctctctttatgcggacccggctgcggacagggaagaagctgcgtcatccacgggagcctattccgtagcgggagccctccgcctgcctgaaaatacgaccaagagggatgtctacggcatgaacgtgggctggaagctgttcaagggcaaaaatgccccggaaggagtgaacagtccggactttaatgattcctcctgggaatccgtgaatcttcccaacggcattgagcttcttccggaggaggccagcggctgctccaattaccaggggccggtgtggtaccggaagacgttcacggccccggagaagctgaaaggcaggaggaacaccctgtattttgaaggcatcatggggaagagcgaggtttgggtgaacggggagaaggccgcggagcatttcgggggttatcttcccgtcatcgtgaatctggacaagtggctgaagccgggccagaagaacgtgatcgtcgtgaaggcggacaattccaacgacgggtcctatcctcccggcaagccccaggaaagcctggatttcgcctacttcggaggcatttaccgtgacgtttacctgatttccaccggtcccgtctatatcacggacccgaacgaggccggaaccgttgccggcggcggagttttcttccggacggaatcccttgacccccgtacccgcaagggcaaggtgggagtgaaggtgcaggtggccaacgatacggacaaggaacagaaggtgcgcgtgcaggcgctgatgacggaccccaagggcgtggaccccgtcggagagacggccccgctggtcattccgccccattccacgggtgaagtggatattcccttggtgatctccaatgtgaagccgtggtcgccggacaatcccaatctgtacaccctgagcgtggaggtatggaacgccgccggagggaacaatgccaagaatccggcccatctgctggacaaccgctccatgagagtgggcgtccggaccgtggagattacggaaaaggggctggtgctgaatggctccctgttccctgaaaagctgattggcggcaacaggcaccaggatttcgcccggctggggaatgcagttcccaacaacttgcaatggcaggacgccgtgaagctgaggaaggccggcatgcgtgtaatccggagcgcccattatccgcaggatccggccttcatggacgcctgcgaccgcctgggccttttcgtcatcgtcgctacgccgggctggcagttctggggcaaggggccttttgcggaccgggtttatgacgacatccgccagatggtgcgccgggacaggaaccatccctccgtgatgatgtgggagcccattttgaacgagacccattacccggcggatttcgccaagaaggcccgcgacctggtgcatgaggaatacccgtataagggctgttacaccgcttgcgacgcagtggcccagggcaatcagcattatgaggtgctgtacgcccacccggccacgggggacaagcactggtccatcaaggaacggaaggacaacaagccgtattttacccgtgaattcggggataacgtggatacctggtccgcccataactccacctcccgcgcggcgcgccactggggtgaagtccccatgatggtgcaagccctccattacctcaagacctcgttcccgtacactacgtatgataccctgaacgccgctccggcctaccacttcggcggttgcctgtggcaccccttcgaccaccagcgcggctaccatccggatcctttctacggcggcattctggatgccttccgccagcccaagacctcctattacgccttcatgtcccagcggccccagaagacgcgcaatgagctcggttccggtcccgtggtgtacatagccaacgaatgcacgcctttttctccggaagacgtgacggtgttttccaactgtgattccgttcgcctgagcgtcaacggaggcgcgccggtggaaaagaaggtggcttcctaccccaacggcctcaagcgcgttcccgtcgtgttcccgaaggcctgggatttcatggaaaacaagaagctcgcccgcgccggcaaggaaggagcggtgaagctggtggcggaaggcctgattggcggcaaggtggtgaccaggcatgaagtgcggccctcccggagggcggaaaaaatccgcctgagcctggaccgtgaggaaggcgtggagctgtgcgccaacggttccgacgtgtttgcggtggtggcggaagtcacggacagccgtggaacggtgaagcgcctgaatgatgaagagcttgtcttttctgtggaaggtcctgccgaattgctgacggattccccggacggcaccctgacccagcccgtcaagtggggctccgctccggcgctggtgcgcctgggcgccaagcccggaacagtgacggtgaaggcctccgtgaagcatcccggctctcagaaacccgtttccggcgtcttgaagtttgacacgaaggctcccgggctgaacatgctcttcacggaagatgccgtaggcaaggcgaagaagggggcggctgcgccgtcttccgcagaggcgcctgcttccgaacgggaaaaatccctccagacggagctggaaaaggtgcgccatgagcttaacaagctgcgcaacgacaaggtgagcgcccagcaaacccactttgaataaccggactccccgccatgctgagagaaaagatcatccgtttctgcctgctcctgctccggctggggatggggggcttttttctctttgtggcggggcgcaagctgttccacctggaccagctccaggcgactattgaccggttcgccattttcccggaggcctgggggcatcccctggcctgcctgggcgtggcgtgcgagatcgtggtgggtctgggactcctcttccgccggacctgcgccggcgccgcgctgctgggcagtgcgctcacgttcacgtttgtagccctctttgtgcagggctggatcagggggcttgccctttcctgcaactgcatcggcgtggaaagggaggtgaccagctatccctttgaagtggcgtggaggctgggcctgttcctgctgatgctggtcatcctgtggaattcctgccggaaggggaagacgtatttcaatgtgacccggctggatttcagcgaaatgtgaccgatgggaaagggcgtgcggccgttttcaggcctggaacgtttctctgggaatacattccggggagaaggatttccagggaccggaagacccttgctccctggaggcagtttcgcgtgcacgccgccgcattcatatatgcttggagaacaggctccctttcccggaatgaaggtttgatccgttcatttttcagatttactcaccctgcgggcttcaagctgcgctttccgacctgccggtttgtccggtttcccgaccttcatagcctcattttaccaatgaacgccgccttccgtccaatcgggttttcaccgtttcttgagaccggtgttcgtcgtggaaaatttccttgcaggggcagggaggcagggtatcgtccggagggatggagaagcctgaagcccgcaggaaggaggaacccgcaggccggcgcatcaccctccgcttgttctccggcgcgaaccctgtgcacatgccctggctgccgccaaaagaaggcgcacctttcccgggcgcctttgccgccgtactgtcttacagcttgtggccgaaggtatcttccggcttcagggatttgatcagttccagcaggagcttgatcgtgttttccacgtccgtaagggcggccgtttccaccggggaatgcatgtagcgcaggggcagggataccagagcggaggccacgccgttgcgggaaacgtaaatgctgtccgtgtccgttccggtgcggcgtccggcggcttcgtgctggagagggattttgttcttgtcagccacgatttccaggcgcgccaccaggttggggtggttggccgtgccgtggatgaccgcgggaccgccgcccagcttgatgtctccgaatttgcccttgtccagtccgggggagtccgtggcatgcgtcacgtcaatgcagatggccgcgtccggacgcaggcggtgggtgatcattcccgcgccgatgcagcccacttcctcctggacggcgttgacgagcatcacgttccaggcgaggggctttttcagcttgcacagtttccttgctatttccgacaggacgaaaccgctcaggcggttgtccagggcgcggcataccagcttgctttcattcatcagcatggggccgtcgcaatagacgcccacatggcccacgcgcagtccgagttccgccacctccttgtcggaggatgcacctacgtcaacgtagatttcccagattttaggttccttttccccgggttcccgcaggtggatggccgtgtttccggttacgcccgttacttccccctgggagcccaggaagcgcacgcggcgtccgcgggcgatggccgtatccgtgccgcccacgcgctccacgtaaaggaagccgtccttggtgatatggcggatcatgaagccgatttcatccgcatgggcttcaatcatgagcgtgggagcgttttccgcttctgcgtggaaggtggcccaggtgttgccgtaggtgtcgcactggacgtcttccgtgtacttgcgcagctcgtccgcccagattcgctgggcgtctatttcaaagccggaggggctgggagtttccagaagttccgttaaaaattcaagactgtcgtcgctgatcttcatgacttttgtatagcaccgttcccgtatccgctcaacaggaaagcatggctcccggcggggaggcgttccgggagggggatgaaaaagccccgcctgcacgggatgcaggcggagccgggaaatggttttcagcgggggctaggcctgcctgaccggagaaagcccttccaggacgtcctgcttgtccatgatatagccggtgtccggatcatggtactgcatggagtaaacggatgttctggcgctcccgtacgggtccgtttccttcgcgacgggaagacggttgctcagggaggggaagcactgctccaccagttcaaaggtggtgacgggctccggcaccaggttgacggagaagattccgcattcccatgccttttccacatccctgaccaggcggttcatgggatagagctggtggcgttccagcagggccgcttccagttcttccgttccttccggggcggcggccagcagatccgccacgctcatgtccgctcccgttccggtgacttccggaaggtagacgttcagcacgcgtccgaaccggaggttgatgaaggctttcatttccaccagcgcggcaagccattcatcttccggttcgcggagcaggggggaatgttcattgcccgtttccggctgggtgtcaatgcaggtaacgtaggttacccgttccgccttcacctcatgcaggaggtcgatcagggttttaacctgcgccagaaaaggggccatgttctgccggatggccctgcgcccttcccggagggaggggcagatgatcacggcctgcccgaattccttgccgcgcagcagggacagattggtttcatcaatcaggtagtcgaagtaccgttttgaggaccagaaggcgccgagggcgcaggaggaaccgatgagtgccgtgtctgtcatggggaggtgcggaggttgggcggttgaatgggatggtgccgttatttcagggcgtcaaaggcggatttgaagaggaagtatccccagccccagtcttcattgccggcccagtccttgtcatagtggtggcggggcagcaggaagcgttccgggtggggcatcaggcccatggcgcggccggtggaatcctggaggcccgcgatgctgcattcacagccgtcgcggttgtccacgtactggagagccacatttccggcagccaggtatttttccgcatctccggggcgggtgacaaggcggccttccgcgtgggcggagggcagctcgaattcatccggaaggccctggaggaagggtgagtttttagctaccttcaccagcttggcccagacgcattcaaaacgttccttcttgttgtcaatcaggctggaatccggcagaatccccagcttggtgagtatctggaagccgttgcagatgcccaggagcaggccgcctccggcatggtgccggtgcagggcgtctcccaggaagcgttccgtttccagctgggccaggcggccgctggtgacgtagtccccgtagctgaagccgccgccgaggacgacgagctgggatttggcgacgtgttccggcgtggccgtggcgatgggctggatctgggtggagaagccggccgcgcgcagggcgcgttccgtttccgcgtcacagttggtgccggggtatttcagtaaaagtgcgtgaggcatattggtagaaatgaatcgttggtatggttaggtcccggtttttggaaatcaataataaggggtgagcccgtccttccagagcttcttgagtttggctacgtcgcagtccagcaccttttccccgccgcagcaggtggcggtgaggcgcttttccttcgtgacgctaccgatgcaggcgcaggggaagccggccatggccgcttcaaagtccgcggcgaattccgggtccacttccaccaggatgcggcccgtgctttcactgaacagggggactgccggggatttccatccgttgacggtcggcgccttcgtgaggtccagccgtacgccgcccttgccggagaaggccatttccgccgccgtgacggccaggccgccttcggagacgtcgtgggcggagagcaccaggccggaagtcagggcgttgtaataggccttgtacagttccatgtttgccgcacagtccgtttgggggaccttgccgtcttccacgccgtgggtgcgggcgaaaacggagccgcccatctcgtcttccgtgtggccgatgaggtacagcaggctgtcgtcccgccgcagggaggagccgataacatggtccggactttccaccacgccgaagccggagcagaggaaggtgacgggcacgttgatggggccgtcttccgtttcaaagtagttgtagaaggagtccttgccggagatgaagggggcgttgtacgcgtccgccgctctggcgatggccttcacgcattccaccaggcggccgagttccgccgggtcttccgggttgcccatgcagaagttgtccagcaggccgatcttgtccggattggagcctaccaggatgagctggcgcacgcattcgtccacggtgccggtgcccatggcgtaggggtccgtcttgccccattccggaagaatggcgcaggccatggccatgcacttgtccgagccgtcgatgtccaccacggagccgtcctgcggggcgtccgcctgtgcgcccgccaggggcttcaggatggtgttgccctgcacttcatggtcgtattcccggatgatgggttcgcgggagacgatggcgaagtctcccatgacggtttccagggacttgttcaggtccttgtccgggaggggcaggcccgtgaggcccttgccgggggtgaagacggattccagcttcttgatgggggcgtcatgcagcttggagttgtccaggcagcagacgagttcccccttgtgccagactttcaggatgcccgtatcgtcggaatggcccaggacggtcagctccgtctggaaggtgtccgccagcttctggagctccggcaggtctttttcctccacggccaggaccatgcgttcctgggattccgacaggaagatttcccaggagatgaggcccggttccttaaggggtgcgttgtccaggaagatttccccgcccgtgacggagagcatttcaccggcggcggaagagaagccgcccgcgccgcagtccgtgatgaagacgatgaggccgcgttcgcgcgcttccagaatgaagtccagcgttttcttttcctcaatcgggttgccgatctgcacggcggtgaagtcctcttcgtgggaggcttcgtccagcgcggcggaggagaaagtggcccccttgaggccgtcgcgtcccgtgcgtccgccgatgacgatcaccttgaggcctgggcgcatttccttcaggatgtccccgcggggaatcacgccggcggttccgcagaagacgagggggttgtaaatgtacgtggggtcaaactggatggcgccgttcacggtgggaatgcccatgcggttgccgtagtcgcgcacgccgcgcaccacgccgcgcatgatgcccagggggtggatgacgtccggagcggtgatgtccgccgggtccgtatccggagcgccgaagcagaagacgtccagggaggcgatgggcttggctcccttgcctgcgcccagaatgtcgcggatgacgccgcccagcccggtgttggccccggcatagggttcaatggcggaggggtggttgtgcgtttccgccttcaggcagacggccagcttgtcgtccagggcgatgaagccggcgttgtcgtcaaacgcgctgagcacgaagcccggcttgcgttccatgatcttttcggaaggcttcttgatgtaggtcttgaagaggctgtccacggtttccggcgcgcctccgttgacgctgtggctgatggaggcggagaagatgcggtgcttgcagtgttccgaccaggtctgggcgatcacttccagctccacgtcagtggggtcgcggtcgatttcgcggaaaatctgctggacgacttccatgtcctcgcgggacagggaaagcttctgctttttgctgagttcaagcagttcgtcgctgctcaggtccctcacgggaacggtgcggtaggttttggcggacatgtggatggggaaggagaggggttaggcgatggtccagttgtgaatggcggggttgcagacgtccttggcaaagcgcgccgccagggcttccttgtccccctggccgaagacgtacacgcgctgggtgattttcaggccgtccagggtaaagaccatgttctggcggccgcggtagttttgcaggatggcttccttttccaggtccagggcgccggccttcatgccgtagtcaatcgtgaacagggagtctttcaggatgggggcggcctgttccgtgcattcctgggaaatggggtccaccagcacactcaggagatattcgcgggctttttgttcgtccccgctgatttctacggtgtaaacgcggctgcggcggaaggtgaggccggcattcaggggagtgtagagcagggcgtccgcgttggcggcggcctggaaccggctgataacttcaaagtggagggtcatatcgctcaagagtggtggtaaaatgaaaaatgggggccggcgggaaaaccggctcccatgggaggggaaaggggctcaggccttgttctggagccgggagaggacttcctcgtaagcttccatcacgttgcccaggtcctggcggaagcggtccttgtccatcttctcgccagtcttgatgtcccacaggcggcaggtgtccggggaaatctcgtccgccagcacaatccgggagggatcttccgccaggcgcccgaactcgattttgaagtccaccagcgtcagtccgacctgcttgaagaagtcgatcagcacgtcgtttacgatgcgggcctggtccttcaggaaggcgcattcctcttccgtggcggcgttcagttcacgggcgtagtcgtcattgatgaaggggtcgcccaggtcgtcgtccttgtaggagaactccacgatgggcttcttgaagggggtgccttccttgacgcccatgcggcggctgaaggagccggcggcgatgttgcgcacgatcacttccagaggaaggatggaaacctttttcacgtcgatgttgatgtcgtccacgtccgcgaccaggtgggtcttcacacccttgctttccagcatgcggtaaatgaccagggtgatggccttgttcatcctgcccttgttttcaaactgggccttcttggctccgtttccggcggtggcgtcgtccttgtattccatgcggaggacgttgggattgtcagtcgtataaaggcgtttggccttcccttcgtaaataggttccatgatacgtgttgcgcagggttgaatgcgtgcggggatgttacgccagacgttccgcacggtcaagccgcaactggacgaaggaaggggcgcctccgcgcgccaaaaatggagcgttccggaaaaggaatggaacagaaaccggaagggaggcggtgcccccggtttgcgcatccccgccgtcgcgagggagataggcggcatgatggaagggctgctcaccgggattgccaggggggagctggacgacggaaaagagagaacggctcatcacgtggacgataccggcttttgcaccgtgcgcggggctgacggaacggagaggctcatgtctgccgctgatgctgatttgggaactgtggtggagctgatggagtgtgcgtacagcgcataccaggacgaaagcgtgaaggacagtgcggggtatatcatgaagcattacgatgtgttgcgggggaagattccgccggcgggagggtacccccgcaaagagtgctttggaatcaatgggagccgttttgactggtaggcggaaggggttcaggcagcccttgatgcactggccgtgtgcctctacgggaatttagtcttgataccggtaggggtgcgcgtatcatgcgctttagtatgcacgccgacttggagaaattattgtctctggggaaaatcaccccctctctcgctgaaaaacttgatcgcatcgcacctggccgttactgcttccataccacctggggcgccggcaaagtcatttcctggaacctggccgccaaaaagctggttattgattttgaggaaaatccggaacacgaagttgccttggaatttgctccaaaaattttggagttcctccatgatgaccatttcctggccaggcgttatgaagataccgaatccctgatcaacctgtccgtggacgatccggtggaactggtgcgcgtcaccttgcagggctacggcaattcccttaccccggaaaagctggaagctgcgctgaaaggcaccgtgattgccgcggacaaatggaagaactggtgggacaaggtgcgcgccatgctccgttccaacgtccagttcatgatgcctacccgcaagggagagcgcatcacgctccgcacgaatattctttcccgcgcccaggccgccctggaggattacaacaaggccgcggacctgaaagccaaggtgcgcgtgctggacggcatcaagatggaaacggtcatgacggagccggacgccgtcaacgccctggttcaggcggtggacgccgacgtgcgcaacggcggaagcctagctcttcagcaggtgctggagctggccgtgctccgggacgacctgatcgccgccgtgaagaacacggaagcggcccaggccgcctaccccctccgctccatcgtggaagccaatatcggcgatgtggaacgcttcgcggaagtgctcaattccatgcccgccgtgcgccagaagcgcgtgtacgttacgctgcccgccgtctttggagaagagtggacgcagaaggcgctggagctgtttgacgcgagcggcgcccgcgccgtgggagagattgccaagttcctgatagaggaagggcacgacaaggccctggtcaagcatttgaagcatgaactgctgcgccagactcttccggctgaatccctcatctggatatgccgccagcggcatgacgcctccaagcccctcttcggccttcccgtcggcattgcgatgctttccctgattgaacaggaccacatggacggcggccccaaccgcatgctgcgcttgaaaaacctgttcatggaggacaagaacatcatccaggaaatgatcaaggggcaggacgtggcggaagtgcgccagttcgccaagatgctgtacaacacctccgccttctccgaacaggaccgcggtgcgctgatggcccgcgtgatcagcgtgttccctgacctgcacgccatcgtgctggacgccttggtggatacctccgacaagccggaaccgattttcgtttcctgggacagcctggaagcccgcaagaaggagctggaagagctggtgaatgtgaagattccggaaaacctgcacaacaagaagatttcccgtgcggagggagacctccgtgaaaacggcggctaccaggatgccaaggaagtggaaaaggtgcttaaccgccgccgttccgaactggagcaggcgctggcgctggcccgcggcacggactttgccgtgacggatacctccaaggccgccatggggatgaaggtgaccctccagcccctggccggaggggatgccgtggtgtacaccattctgggcgcgtgggatacgaatccggaaaagcacattgtctcctatctttcccaggttggcaaggagctgacgggcaggagcgtgggagaccaggtgaagatcgtgccgatggacggcgacaagaagaaagtgttcaccattacgaagattgaagccgctttttaatttttaagagagttgctttcccttttgactaaggcctttaaaaaggctccccatcctgaaaggaggggagcctttttgttgttcatggaaaaactttccattgtttcacggatttagaatccgtggtcaacaaaaaagaccagagttcggattattatttcattagtatgaataccttaatcaaacagactattgtttgaatgggctggacaatctctccggcaaagattcatttttcaaggcacaaaaaataaaacggcttattttcaatgagatgcgcagtatattttttcagattttcttctaacattcataacggattctaaattcgttatttgtcaagaaatggaagcggtgtttcatcatttccaatcacatatcccattgacaccatgaagaaaacattattcattctggcaactatggttgcggcggcggtggcggccgaagcctccaccgttctgatctcgttcgggatcaattcaggcaatggcaccgccgttgtggacggcacgtatctgggagaacccggacagaaagtgaacaagatttccacgggacagagtaattcctatacttccggaaccttggtcactacggggggaggaagcaccggaatcaccctgacgacgggaggactctgctgcggaggtcccggcgccatgaccgatgccgctgccaaagggtccgccctgggccagggcaacaagttttacgatgttttcggccaggatatgactaccggcaatccgatggggggcgcgatcaatccgataggctccgcgaacggcaatttcacgatgtccctgaacaacctgtccgccggcacctacacgctgaccatgctggtgggacgcggaaacaactacggtgcgggcaacacttcttccttcagccttgacggcaccggaatctccaacatttccgccagcctggacgattactccaccgggtccggcgctacgctgaacggcgccaccgtcacgggcaacacgcataccggagactggatgctgattacttacacgtttgacgtggcggcggatggctcccggcttgatatccagtcccagggaggtaccggcaacatcaatgccctggcgctgacctccgttcctgaaccggccacggccagcctcggattgctgggcctgggcgttctgctgatgcgccgcaggcgcgcgtaacgtttgttcttcatgcaggcgccggccgttcgcgaaaggaacagtcggcgccttcctgtttacggaagaggaaatcgccatgagaaagctgaattggtgcggatgggttccggctgtgctggccgcctgctgtctggcgcatgcggaagaaatagggataggagtgctgaacggaactgcggccacggaggcggcgttccggcaggcggagcccggaaccctggcggaggaaggaaaaacatggaatttcatcaagcccgcggcgaatgccgccacgaccgtttcctccttgaaaactgtggcgggagtgtccacggaagcctcctgcgccatcaatccgggttattgcgccagcaacggcatttttgcatcgggcaggaaccgtgattatttgctcatggattcctgggccggtatccggggaacggaaaacgtcgtgatttcccggcttcccgattccatggcggaatactgccatgtggaaatttacggggattgcaatgactcggaccgggacatgctttatacggttaacggcctcaccggcaccatccaggaccgcggcacgttttccggcgcgtttcaggaaggaggcaacaggctgacgctgaagtatgtgccggtcaccggaggaacgattaccattacgggcaacggggcctcccaaacgcgttccgccatcaatgcggtccgcctgacggctccttctcccggcatcgtgacttttacggcgactccttcagaggtcatggaagattcaacctccggagccgtcctgagctggaaaacctggaagtgcggagcagtcacgctgagcaccagggacggccgggatattccggccactacggaagacggcacgggttccgtcacggtaaagcctgacgccaccacgacctacattctcagcgccgcctgtgaggacggaaccgtttccaaggaagaagtgacggtgaccgtcaggaagcaggaaccggaaatccttctctttgaatccgacaaaaaaagggttgctcccggcagtgatgaaaaggccactctgacatggagcacggtgaaagcggaaagcctcgccctgaccgccaatggcgcggagattcccatcaccagcacggcgggagccggcagcgttcaggtgtctcccgcggagacgacgcagtacacgctgacgctgaccgcggctgacggcacggagaagagcaagtccctgattatttccgttctggcggagaacacgcccaacgtcctggtgttcctggtggacgacatgggctggcaggatacgtccgtgccattttattacaaggacggccagcccgtcgttacggagctgaacgccttttataaaacgccctccatggaaaggctggcggcgcaggggatgaagttcacgaatgcctattcgtgccccttgtgttctccgggccgcacgtccctgatgacgggcaagacctccgcccgtcaccgggtcaccaactggacggccgtgaatgcccccacgctgaatgaatacagcggcggtcttccccacatccgtgctccccagtggaacatggccgggatgagccagcaggaaattcctctcccccgcgtgctgaaggatgccggctaccggaccatcacggtgggaaaggcccacttcgccccgtccaaccagctttattccaatccagccaacctgggatttgacgtcaacatagccggctgctccgccggacagcccgcctcctaccggggagaggatcagttcggctccgggaacacccatgttcctgacctggaggaatattacggaaccactgcggcggaagacaggaagaggaatttcctgacaaatgccctgacgctggagatgaagaagcagatcaaggccgccgtggatgagaatgcgcctttcttcgcgtacatgacccattacgccgtccaccagcggcacgaccagccggaccccaacggggactacgatacttatccctcgggcacgtcctttgaaccgggagtttccatcggcggcaatctccgcaatttcggcaccctgatcggcggcatggacaaatccctgggggatctgatggattacctcaaggaactgggcgtggccaacaggacgctggtcattttcatgtccgacaacggcggagacgctcccatccagcagagctatagcggagatattccatggcttgagaaaatcagcgccgtagctcccctgagagggcgcaaaggcagccgttacgaagggggaacgcgcatcccgatgatcgtgggctgggcggaggccgattcctccagccccatccagcaggaatatcccattccgcagaattccgtgaaccatgacatcgtggcgatttgggacatttatcccaccattctgagtatgctgaagctgaaggttccggtgggccatcaggtggacggggaggacatcagtccctatttccggggggattcttccttccaccgcacccagaagatattccagcatttcccgcaccaccattcctacgccaatttctattccacctgccggaaaggagactggaaggtcatttacaattacatggaccagtacgcccatacggatttgtattccggcaacggctacaggaccgcgggccgcttcccgtggcagcttttcaatctgaaagacgacatcggagagagcaatgacctggcccaggacccggcgcagcaggaacgcctgatgcgcatggcgcgctccctgatccgggaactccgtcaggcggatgcgcaatatcccgtcctcaccaggaacggccaggcggtggggacggcctacatccgcatgcctgatttcccggacgtggattccgacggcgacggcgttcccgaccttgtggaggacgccaacggcaacggcgtcatcgatcccggtgaaacggacccggatgatgcttcctccttcgttcccatccggcaataaacttttcaccaactggacaagactcatgaagaaaacacgttgtttttccgttcttcccggtcgtctgcgtcttctcaggattggccttgggtccgccgccttcctctccggggcccttctgctggcggatgtgctggtcaatgccggcggcggctccagcaatgcggacaagacgggcaacggcggcggcatattggattacgggcaggtcactttttccggctccgcctcctatgaaaataacacggtgcgcggcttctcccagggcggagcggtttacgcaggttccgtagtccagcaggccgccgtttcctttaccggcaacagggcggagggcggcagcggcggcgcgctctacagccgcgggaacgtgcaggtagcggcgggttcctccttttccggcaacgcggcggcccacaacgggggcgccctgtgcctggatgccaatgacggggaggaggagcgcaccgtgaacgtggaaggcggctgttcctttaccggaaacagcgccggaaacctggggggcgccgtttacgtttccggcggcagcgcggaggctcccaccgtgctcaacctccggtccacggattccacccgccccgtttccttcagcggcaatttccgggggcgttccgcgggagcctccacgggcggcgtgcccaattccatcacggtcatgggccatgtgcgcctggtgatgcatgcggacccggattgcctggtcagcatggaagaccctctttattccttcgccgggtattcctccacctccagcctgagaaagacggggggaggaacgctgggcttaggcggcattttcctgtgccattttccggtgagcgtggaaggcggaacggtgcggctcggcacgaacgccggcgtgcgcggaatgacgcggctggacgtggccgcgggggcatgcctgtccttctctctcccccggaaccctagccaggaggccaagtggagcgcggaggggccagtgtctctggatagcacggcggaaatccgcgtggctctccctgccatggccgggaaggaacaggaacagagctggaagctggtggaagggaccactctttccatggcggctcttccctccgtttcctatgacgccgccagtgcggaagcctggaagagtgagggttctttttccctgaaacaggagaatacggcgggaaaaagcgccctggtgctagcctggacgcgtacgccttccccgtatgaccaatggaagaaggaccattttgccgacggaacgccggaggaccagactgtcccggacgcctgtcccgcgggcgacggcatcaccaacctgatgaagtatgccgcggggctggacccgaacaagccctgcggaagcgtcacgaggctggcggtcagggaggaaaacggggaatgccgcctggtgctggaatggccggtgaatacggcggccacggacgtgacgttcagcgtggaaagcacggaagacctggttacctggagggaggaagcgacggtcgagccatccggagaccgtgccgaataccttgatcccatagtgattgacggcaacgcgccgacgcggcggttcctgaggctgaaggtgtcgcgggaataaggtgaaggctgtccattttttatcctgaaccgcctggtgagtggatccagaggatgaatgatgccggccttcctttccgggatgccggaggcacaatccccgcggcatgtggaaatagccgggtttaatgggttggccagttcatattcatacggagaaagacggagcttgcgggcagagggggtgttgggtggggtttcatcaacccttttccgggggatgttctggcgggtcatgaaaaagggctgttccgccggatgcgggacagcccctgaaaaggaatggcggttaaacgccgcagattatttggagagcaccttttggacggcggcaacgacgttgtccacgttcatgccgagctcgtccagaacttgcgctccgggtgcggagaagccgaagcggttgatgcccacggcttcgccctggcagcccaggtatttccaccagaggtccgtgacgccggcttccacggaaaccctcttctcgcaggaggagggaagcacgctttcccggtattcggcagactgcttgtcaaagcggaagaagctgggcatggaaaccacgcggattccttctccggttttttccgccgccttcagggccagttccagttcggaaccgctggcaaggataatggccttcaaggttccctgttccttccgggctacgtagccgcctttcagcacgccttcccggcgcgtttccacgggaatattgttcagggtcgctaccttctggcgggtcaggatgagggcggtggggccgtcggcgcgctgcatggcggccatccaggctcctgcggtttcttccgggtccgccgggcggatgacgtccaggttcgggatgacgcggaggccggagacggtttccaccggctggtgggtggggccgtcttcgcccacggccacggaatcgtgcgtcaggatgtaggtgacgggcaggccgctgagggcggccacgcggatggcggcgcgcatgtagtccacaaagacgcagaacgtggcggcgctcacgcggaacaggccgtcataggcgatgccgttgcagatggcggccatggcatgttcacggatgccgaaccagaagttgcgcccttccggggtttccgcggagaagtcccccgcgccggaaaggtagtttttattggagctgtacaggtccgcgctggtggtcaggaaccaggggtccgccttggcgatggcgttgatggcgacggctccggcggaacgcgtggcgtcgctgtagtcctgcgggaaggcggggatggccttgtccgagtccgcgggattgacgcccctggcgcaggcgcagatgccggagtccagttccgcggccagttccggataagcccggcgccattgttcgtaggtggcgttccaggcgttgaaagcttcttcccgtctggccttgaggtccgtgaaggcgctgcggacgtcttcggaaacgtaatagcgttccccggcaggaatgccccagttggcgtgggcttcttcctggagcttggctccgccttctccgtggcccttcgtggtgccttcaatgccggggatgcctttgccgattaccgttttggcgatgatgagctggggcttgccgttcctggcgtttttggcggcttccaccgcttccgcgatggccttgaggtcgtgcccgtcgatctggcgcacgtcccagcccagggcttcatacacggcgcgcgggtcggcaagctgggtgcgttccgcgggggcgtccagcgtgatgtcgttggaatcgtaaatgagaatgaggttgtccagcttcaggacggcggccagggcgagggattcgcgggccacgccttcctggaggcagccgtcccccgtgaggcagaagatgtgctgggtgaagatgtccatgccgggcttgttgaaccgagcggcggcgcgcctggcggagagagcgaagcctacggcgttcgcaatgccctggcccagcggccccgtggtgcattccacgccttccgtatcccggaattccgggtggccgggcgtgatggagcccttgtggcggaagcccttgaggtcttcaatgccgatgttgaatcccgacaggtgcagccagccgtaaaggaacatggagccgtggccggcggagagaatgaagcggtcacggttgagccagcggggctgcgcggggcagatgttgagcagatcgccgaacaggacggccccgatttcggcgcaccccagcggcaggcccaagtggccggatgcgcagtcgtgaacggcatccatggcaagtccccgcgcctggttggcggctttttggagaaggtcaagattcatgcccgggcaatatgagcagatcagccccatattggaagcctaaaatgcgtctccggcaacagggcggagcggcggaaaagcattgaagatggaagcgccgggcatctccggtccgcatgccgcggcgccccctgcggcacatggcccggcatgcgcaggcggttcaggccatgaagctgcggaggaacgtgttgggcgtccttagcccatttctctttcacggctccatttgaccccgtttttgatgaccttggccgggtttcccgccagaacggtgaattcctcccggaaggatttggtgacgaccgattgcaggccgacaaccgtatttgccgggatgatggcatttttggtgaaggttgccccctgcccgatccagcagtggtcgccgatgaggacgccctgcggctggtcgttgagcagttcccccgtctcggcatccatcaggcgatgggagtcgtttgcccagatggtgattccggaggacagcatgcaatcgttgccaatgtggcatttgccgcccacaagcatgaccgctaatccttcgatgctcgtcgaatggccgatggacagggcgcttccggatgcagctgccagaatgctgacattgttccagtggctgtgcccggacgacgaggagccgaattcgattttcgcgccgcggacatgtttccagatgtggatggagatattgtttaaggagagcggagcatggaagatgagcgtgttgtgctctccctcaatgttcagccggacggaccccggtatctggtacggctcgacaagctgtttttcgccggaaggaagaatgagaaaaatgcggtttcccaccgggtttacataaccttcccctccctccttcaaacccaggcggacgcggcgcttctttctcgtttgcggagaaagagataggttgcaatagattgttgcaagaaaacggttcatgaggaaagccccgattcttcatcgagaaaggcactctcccggattctccattcagggtcaagcggaaaatggcgcaacggccttggccccgttgcctggcggcagccgccgggaaggcttggcttcatggggtacgccatgcgccgttttccaaggcggggcggtgttgcctgctccgttttcccgtcccgcgaaggaaggccgcaagcaagttgtttgcctttccgggatttgaaagaaactttgttgacacccttgaaaaaattagtttataataattctaactaaaagacgccatgagtgaccaaaagaatttaacgacctccgtcggagcgcccgttccggataacgaaaatgtgctcacggccggcccccgcggccccatgctgctccaggacgtctggttcctggagaagctggcccatttcgaccgggaagtgatcccggaacggcgcatgcatgccaagggctccggcgccttcggcacgtttaccgtgacgggggacatcacccgttacacgaaggctgccatgttttccggaattggcaagaagaccgacctgctggtgcggttttccaccgtggccggggaacggggagcggcggacgcggagcgcgacatccgcggctttgccatcaagttttacacggaggagggaaactgggacctggtgggcaataataccccggttttcttcctgagggatccgctcaagttcccggacctgaaccacgccatcaagcgcgacccgcgcaccaacatgagaagcgcgcggaacaactgggatttctggacttccctgccggaggctttccaccaggtcaccgtcgtgatgagcgaccgcggcattccttcctcctaccgccacatgcacgggttcggcagccatgcgttcagcatgctgaacgcggacaatgagcgggtatgggtgaagttccacctgaaaacccagcagggcatcaagaacctgacggacgcggaggcggaagcgattatcgcgaaggaccgggagagccaccagcgggatttgtatgagagcattgagcggaaggatttcccgcgctggacgatgtacatccaggtgatgacccaggagcaggccaaggcatgccccttcaatccgtttgacctgaccaaggtatggccgcacggggattaccccctcatggaggtgggcgtgctggaacttaaccggaacccggacaactatttcgcccagattgagcaggcggcgttcaacccggccaacgtcgttcccggcatcggcttttccccggacaagatgctccaggggcgcctgttctcctacggggacgcccagcggtacaggctgggggtgaaccataaccagattccggtgaacgccccccgctgcccgttccacagttaccaccgggacggcatgatgcgtgtggacgacaacgcgggaagcacgctgggctatgagccgaacagttacggggagtggcaggaacagccggagttccgggaaccgccgctggagctggacggcgcggcctggcactgggatttccgcgaggatgacgacgattattattcccagccccgcgccctgttccggctgatgaatccggagcagagggaggtcctgtacggcaataccgcccgcgccatgggcgacgcgccggactttatcaagcagcgtcacatcgaccactgcatgcagtgcgaccccgaatacggggaaggagtggccaaggccctcggcatgttcaagggataatcaaatttgggtgttccgggcggaagtttctccggaaggggaggcttccgcccgttttttacccgtttgacgcagccaggggattgatggccgtgaattccggcaggcagcacacggaatcgtgaaatatcaggtgcggagggaggacggatggggtaatgtggcctggtggatgtgaatgtgttgctttttgatgattttgagacgctggatgcattcggcccggtggaagtgctgggcaaagtagaggaataccggctgcgttatttttccgaacatggcggaaccgtcgcaagtgctcaaaagacggtaattgtcactgaaccagccacggaggcggacggctgcgggattttagtggttccgggaggaagggggacccgccgcctggcggtttttccgcctttcctgcattttctccggggcatggcggacgatgcggagtattgcctgtccgtctgcacgggggccgcgctgctggccgcctgcggcgcgctggacggcagaagggcgacttccaacaagaagtcttttgcatgggtgaagtccgtccgtggcgcagtcggctgggaggaacgtgcccggtgggtggcggacgggaagttttatacttcctccggcgtttccgccggaatggacatggccctcgggtttgtgagcgaccggtttggcaggtcacgggcggagggaatagcggagcagctcgaatacgtgtggaatgatgactgcaccagggacgtgttcgcgcggaaatgaggttttttcatggctggaatccctgcgcggccagcggaaccgcggcattgcggaaagaacgcgttttttgctttctgtgaggaaagagcctgttatatcatggagggcagaagtacatgaaaatcgtagttaaagtaggaacgggcgttctgacccgtgagaacgggacgctggatggttcttccatcgtgcatctggtcagtgcgctggcggacctgatgcagcagggccaccaggtggtgctggtgagctccggggctgtggggtccggcgtgtccgtcctggggctgccgtcctatccgcaggagttgtccctgaagcaggcatgcgcggccgtggggcagacgcggctgatgcagacgtatgagaatcttttcaaccattttgacgtggatgtggcccagctcctgctgacggcagaggatttgaagcgccgccgccacaacgtgcaggctacggtgctgcgcctgtttgagcacggaggcatcatcccgatcgtgaatgagaacgacaccgtatccgtggaagagctgaagtttggggataacgatattctttccgtgcacatggcgcgcctggtggaggctgacgcgctgttcatcctgacgagcgtggacggcctgtatccccccggaggcagtcgggaagccatcattccccgggtggaggacgtggatgccgtgctggcgttcgcggaggaggaccggggccgcttttccatgggcggcatgagcgccaagctccaggccatccgggaggccgtgaatgcggggacgggcgtttacatgctgcacggccgccatccggaacgcatcgcgctgctgctggaggggaaggcggaaggagccggaacgtattttgtaccaaagggatgaagttatgaagatggagaatcctcttgaaccggtgggacgggccgcgctggcggcttcacgggagatgcttgccctgggaccggaagagaaggcgcaggccctgcgcctgatggccgcaggcgttcggagcgccgcggaaaagattgtctgggagaacggccttgatatggaagaggcccggaagggcggccgcaatgccgcgtttctggacaggcttctcctgacgccggagcgcgtggagcacatggcccgcggcatggagcaggtggcggccctccctgatcccgtgggcgaatgcatccgggagtggacgcgccccaacggccttcatatccgccaggtgcgcgttcccctgggggtcatcggttttatttacgagagccgcggcaccgttacctgcgatgccgccgccctgtgcctgaagtccgggaatgccgtcattctgcgcggcgggagcgagtccctgcggaccaaccgggttctggcggaggttctgcgcgccgcgctgaaggagtccgccgtccccgcggacgccgtgcagcttcttgattccggcagccgggatgaggtgcggcagttgtgcgagctggattctttcctgaacgtggtcattcccaggggtggaaaggggctgatccgcgccgtgacggagtacgccagggttcccgtgctgaagcatctggacggcgtttgccacgtgtatgtggacgccgcagcggatttgaagatggccgtgaacgtgctggacgacgccaagacacagcgcccgggcgtttgcaatgcggcggaaaccctgctggtggacgccgccgcggcggaacggttcctgccgatggcggcggagcgcatgcgccggcgtgccgtggaatgccgcgtgtgcgggcggagcaggccgtttttcggtccggaggccgttcctgcggaggaaagggattggtctacggagtatgaagacctgattctctccgtgaaggtggtggacggcgtccgggatgccgtggagcatatcaaccgctacggttcccatcacagtgattccatcatcacggaggatggaaaggcccgcgattatttcatgagccgggtggacagcgcgtgcgtctaccataattgctccacgcggttcagcgacggggaggaattcggcttcggcgcggagataggcatcgggacggacaagtttcatgcccgcgggccaatggctctgcgggagctgacctcttacaagtacgtcattgaaggcagcgggcagatgaaggacccttcccggattccgggggaagaccgcgcctgaacaggcacgtccgcaatcagaaagggagcaccgcagcatggccgcgatgctccccgcttgtacacacccctgaagaagttccgttagaaagtcagcctgtagccgatgcttccgttgaagctggtggcgcggctgcggaagtccgcattgacatccgcaaaaatggagctggtgtaacccaccggaatggtgatgcccgcgcctgcctgcacgccggtagctccttccctggctccgttcacgcggaatcctgcgccgggcacgctggcgggcgacagcgccgccgtggttttccggtcgccaaggagctggacaacctgcacccgcagttctcccatggacgcgcggcccgtcaggttgctggagagctctccgcggagcctcgcccccagtcccacggtgccgtaggtggaatccatgtcgtccacgctcatgcccaggccccctgattccgtgaagccgtccatccggctcttgtacacggaggcgttcaccaggggctggaatgcggaggttttgttttcatccaggtacaggtcatacgtgccttcataaaaggcaccgtagctgctgccgctggtgctgccgtgcatggcgtacatgccggctccggggatgcctgcggtgcggtccagggaagcgtcgttccatccgtaggtgaggatgacgttgtgcgcccagcggcctgactggatgcggaagaacagattgccgtagtaggagtccaggtctccgttcgccatgtaggcgtccaggtcgccatagctggcggagaaggccgctccccatacgaagctgtcgctgcacgttacgtcaaatccgaaggtgccgccccaggtgttgagcttgtagcctgattcgtccatccggtcatccagtttgcggtagccgccttccccttcaatccaggcgttgaagcagggcaggtcatcgttgatgtactgcggggaggctcccatctgggagaggcggttgcgcaggtggagcacctggtcccggagggctcccttctgggcggagtgcagggcggtgacgccgctgcccgcataggaggagagggcggactgaagggcgcccgtgttccccatggcctgggcggtgcccacggcattgaggaattccatcatggccggggtgatgcttccgggggaggaggtgacggcccacaggctgtccaccgcggctctctggttttccgtggaggcgaagtccttcagcgggctgtctcccagtttggtgaagtggacctggaacagcttgccgtcgtcggagagtatcttgctgatgtcatagacgaggttggcgaagccggcataggtcaggttcaccatgtccgccgtccaggtttccccgtttgccgtggccaggccgttttccgcatagaaggcgttgatggtgaattccggcaggatggcccagtctcccgcggtacccaggccgtaaatgttgacgttgatggaggggtccgccccgttgatgcggatggagccgttttccgccttcacggcggcccaggcattgtccgcgctgcgggccagcgtttccgtattgacggtgaggtccagggaagcgccggagtccagatcggccgccactccgccgttgctgccggtcagcacgagctggaccgcccgctggttgggattgccgcccaggtacagtttgccgttggaggcgatggagagcgtgttggccgtggtattgttcatcagggagaggtccgccgtggcgtccaggtcggaggcgtcccgggtgttgctgccgatggaaatgtccctgtaggtcatggagccgtccgcggccaggtccttgtctcccaggacgaggtggccgcccgcccgggtatggctgacgtccacgccgccattcccggaggaaaggatgatctgcgtgccttcgccccggtgggtgatggctcccgtgccggtgatatcccccttgaaggagtaggttttcccgtcgttggaggccagttccagacgtccgtttgcccccaggtggagcgcgccgttttcctgctcctggtggagcccttccagcgcgatcgtggagccgtcctgcaggcgcaggctgccgccccccagatggagcagcacgtcttcgcccagattgctgtccgtgcccagaatcaggttgcaattgtccagtttcagggtgccggagccggtgacgcttgcatgaagcgtcaggtctgaaagcgtgtctctggcgatggtgagcagggcgcccccgttcagggtgatggagccggagcccgccagatccccggcggccagggaggcggagttcagcgtcagcgcggcatcctgttccacgttcagggcaccggagatgatggaactttccttcgtgttctgaagcacgagttctccctgctgcacgtccagagcggaggcggtcaccctgccgtcaacggtcagcctctgttccccgtccttgacgagctgcgccgctccttcaatggagcccgcataagcggtgttgcctggtttgtccggatctgcggaggtttcattcagcagcgtgatgatcacgtcgctgtccgttcccgtgtttacgacggcatcggcttccgtgccggccagatagcggatggtggttgttttgtcttccggcgcagtggccgcggacaggtcgatgttcagcgttccgttgttggtgacgctgggggttgcccccagggtgctggcggaggtgacgtttttggaagctcccttgtcaatgaccatggcgtccagctggccgaaggagatgattacctggccgccttccgtccgggtaatgtcccacgccatgccattgtattcgctcagcgtgatgtggttggtatccgcgtgcagggcggcgttggtgacgtggaaggcgtagtcccccggagcggcgagcagcgccacggcatccgccgtcagcgtcagggtcaggttccccagggtcagagtggaattagccgcgtcattgaactggatgattcccgtgccgtccgcgcccatgttggcggcggaaagcctcaattgcgtgtcggagccggacaggtccgcatggcccgtcaggccggaaatggttcctgtgccgctgcccatgttgatggagttcagcttgcttccgtccagtccgcccaggttgacgttcccggtgatgccggagacggagacgctcccggctcccagccccgccgtattggcgagcgcccccgcggagatggatattttcccggagacggcctgcccggccaggtccagcgttcccccttccacccaataggttccggttccggtgtctgcggatttgagggtcaggttgtgcgaggtgcgaatcgtgccgttgttggtgatgtccagcgtggctccctgggcctggttgaaccggagggcggagcctgcatccacggtcagggaggcgaccgtattgcccagggccttgtccagcgcaaggtccgaatttccggtgacttgcaccttgtcaaagttctggagcgttccgaggaagccggtagtgtagtggtcgaagacgagcttcttctccccgttcactgttcctccccccttgccatcgatggtgccggcgtatttgtcaaatttgtgttcggaaccgtctccggtggtggcggcaatgtccttcagggtgatggcggtgcctccgttgatggtgccgctggccttgttgccgccgcacaggagcgtccatgtccagttgtccccgtcagccttgcccagaatggcgtccgtgcccgtgacggtcaggctggttccctgggagatggtgccgtccgtcttgttcccggcgtagatttcgttcatgaacgttccgccgttgatgtaaagggaggtggagccggagatggttttgtttcccgtgtaaaggccgccgaaaatgcggtgggagaacacgccgtcattgaacaccatggtgatgtccccgttcacggcggtggcataggctcccgccacggaggtgcggtccgcctccccgttggtgaaggaggtgtcataggtcccggtggaggaggagaattccaggtaaatatccccgtggacggtgcccccgttaacagtgccgaataccgtggatttgccaatggccccttccgccaggcgcaggtggatgtccccgtacaggtcgcccgacgtgtggcctcctatccagccgttatcgctgctgacgccttcccccagcgtcacccacagatcctggcggctgtccgcgctgccataggccccgttgttggcgtaaatgaatttggtgcttcccgttcccgtgatgctggcaatgttggagttggtgccgttgcgggcattatacgtggcattggccccggccgtggccacggcggtggcggcggcgcccgttgtccattcgatcatgcccggcttgagggcggaggaagctccgccgtttgccagataaagggcttccggtccggtgatgccgctggtggagggcgcgtaggagagggagccgtccagcgccagattggacaggatggcgtccagcgtgccggaatagctgaaggtgaggccggaggagctgccccccgccgccgtctgcgcctccccgatgaggacgtcccccagccagatatagtagcccgcgttcaggccgtgggcgttgtcccccgccacgtaggccacgcggatggaatccgcattggcggacatgtctttggagtacaggatggtgcttccccactggatgtacgcttcattgacgttcagcgttccgttgcccagattcagggagaagttgttcgtggtgtcccagccgcccgtggcgccgttgcccaggcgcagggtgaaatccaccgtgtagcccttgtcctgcccctgggaggctccccagttgtaagtgagggtgctgctgccggatttgttgaagttgatcgtgttgttggagatggtgacgttattggcggtaaagcccttggccgtcagcgtctgctgggtgatggagggcgtctggccgaagttgacgcccagttcgtgggcggctttcctttcctgcccggcggaccgccccgcgtaccccatgcccttggccaggttgcccgccatcagcaggtccccctgggcgttcgggtgcaggccgtccgccgtgggattgtggaacatggagcgcaccccgtagaaaggggtggaggaggccacgtcaatgatgcccgcattgatgtcaatgaccttgacgccgttagcggcattttctgcgccccattctttcagggattcgttgtaggtggctacggcttggtgcgtttcagccaggttcccgttggaatgttgcgtccagcaggggatggtcatcactaaaatgcttgcgtggctgttggcggtgcggatggaggagacgatggaatccatgtcgctcaacagaaggtaggtgaccccgtccagccgcaggtgcagcgtactgttgttgttgtcggaaaggaggtcgttggtgccggcgagcaggaaaaacgtgtccggcgtgttggccccggtaaaggtctggcccgtgtaggttcccccctgggttttttccgtgctcaggcccagccagttcttgatgttggagccgtcaaaccgcccgtagctgctgctgttcgccctgccggcgatttcataggtccgcgcgctggccgcggaggaatggagattctggaaaatcctgccgccgtaggaggttcccgcggccactccgccgctgtagttgccggtcatgatacctttttcggtatagctgatgccgttgtctgcaaaaattttgtgcatggcccagcgccaggagccgctgttgacgccatgggtgatggagtcccctacgtacatgacgttgccaaggtttccgtctgaaacagaggcggaggccacggtagagaacagggcgctgcacgcaagcaggacggaccttagagagaagggtaatcttaaacgcatatcctagcagtatgcgaattaggaatccggcctcaactcaaaatgttgaagtttagtgtattataaatttcaatacattgagattgaaatcattgtgacacgtctggtctttttggagcttgctttttcccctgatttttgcagggcttgggatttgccgtgtttttaacagtaactgacggattcctaatccgttgcaggattagtcacaaaggcactggttcatgtccagcgcagggttgtccggaatggagtcattgacgatgacggcgggaacgcccgccaccgtggtatggggagggacgttttccaggacgacggagcaggcggcgattttggcgcaggcgccgatggtgaccctgcccaggattttggcccccgcgccgatcaggacgccggattccacaatggggtgccggtctccttcctccttgcccgtgccgcccagcgttacttcatgcaggatggagacgttgtcgcggatgatggcggtttcccccactacaaagctggtggcgtggtccagcaggatgccgcagccgatggtggccgccgggtggatgtccaccgcaaagacttcgctggccaggctctggaactgaagggccatgatggtgcggccgcgctgccacagccagtgggagatgcggtacgtggtgatggagtggaaacccttgtagaagagcaggggttccagcggcgtgcggcaggcggggtcccggtccacgatggcgatcaggtcgttggcgatctggctgaggatgttctggttttccgccagcgcctcccggatgaggggttcgatcagttcccgcggcatgtcccggcgggagagcttgcgcgccagccgggcagagatggaggtggccagggaattgcgggacaggcagacgtcgtccagaatgccgcgcatggcgggttcttcctcagccgcctcgcgggcgcattccaccacccagtcccatactccgttgatgatgcattcgcagttggtgcactgccggagttttgagcgtttcaggctggtcatggcggaagaaggtggaaaggcaaaaggagcctcctttcccgaaggggaaggctgcacccccacaagtaccagagtacggcggatttgagaaccggaaagtacgtcctatgcccagccgagcatgacctgcctccgtcagccgaagatgacgtgcacgatgtccatgcaccaggcgtccacggaccacgggccgggaccggtcagcagcagcgccagggcggagccggcatagagcaggtggaattccacgccttccccggtttttttcccggaccagttggcaaagtagccgtttttaacgtgcttggtcatggcgacggccatcatgatgatgaccgcgagcgcagctatcctggtgaagacgcccagcaccaggcagatgggggcgaagaattccgtcagcatggccaccttggccaggaaggggggaatgcccattttttccgtgaaggcctggtacgtgccgtcccagcccgctcccccgaaccagcccatcactttctgggctccgtgcggccacaggatcagggccagcgtcagccgaaggaccagcaacccccacgccgccgcaataatggtaatggaatcaatggtgtccatgaatttgaaatggttgaagaaaagacccttttattccatgggacgttcatttccgggcatggaaaaggccggaaaaggaggtcatttcctccctctccggcccttggagtcaggatggcgcgtccgttaccgaggaatggaatggtaaagctgttccagcgccagcacgcagtaggaggtcaccaggacggggtccgcctcccaccagcggttgttggtgtttacccaggagccgtcgctcttctggatggaaatgagtttgttagccagttcgtcacgccagtccaccttgcggccgtcttccagcgtcagggtgtctattcccatggcgctgagagctttggacatggcctggtagtagtagtacaggccctggatgcccatgccggggttttcatccaggttgtagctgttttccagccatttgagggccagcttgacgcggggatcgttcttgtccacattggcgtaaatgagggattgcatgcctgcgtacgtcatgctgccgtaggccttgggcggttccgccttgtcaaacgcggcgcttttgctgtccctggcgctggcgacgcccgggcggtacacgaagccgccgagctgggatttgtcactggagacccagggttccttgttgacggctgggttctgctggcagcggttgatgaattccgtggcggcgttccagtccaggtccggctgttccccgtatttgccgtccttggcgagcttctgggagtagtaaatggcttccagggccagggaggtgttggagaggtccgcaatgggaggggcctttttgtccccgtagccgatgccgccgttgtaggggttgtccggagcgaagtggttctgctgcttgatgaggtaggcgcggcccttgaggatggcgggggcgtattcctccttgttggcggccagcagggccatcatgcacaccgcggtgttgtaggaggacatgccgcggttgaagatggagccgtcctccttctgggatttcaggacgaagtcataccccttccggatgtattccgggatgggcttgccctggttggcggggtcgcgcatgtaggcggtgaccgccagggccgtcagggccggataggaaggctgagcccagtagccttccgggttctgcttgcttttcaggtattcgttccctttttcaatggcgcgcaggatttcctggctgatggaggcgtatttggaggcggccgcttctccgggaacggccgtcacggtggtctggccgaaggcggctgtgcccagcgcggcggccagcgttaatgaaagtgcggatttgaacataatgtgctattgcttgggttgaaccggtttctgggagatggtgacggtgacgttcgtgccggggggcaggtttttcttcgggttgacgatccagcccgtgtcgttgacgccgtcatgaaagtcgccgatgtagttgatgggggaggtgcggctcgcgaagatggagattacttctccgctcaggctggcctggtaggccccttcgtaaaagaaggagttggtgtaaagccagtcattggggtccagccccttgcgggtctgggagttcacgaccatgtcggaaaagtcgctcttctgctccttgccgttttccgtgtaggtcatggcgacctgcacgtaggagtccgcatagtccgcgggcttgggctccgtgaaggggagccattcaaagttttcatcccgcaccgggaagaatttttcaaagcggtggaatttgagcagcgtcatgcccaggctgatgtgcagggggtccgcctccgtcaccagcagggattcatgcagcttgccgttgggcatgcagcagatatattccagaatgccctcctgcatgttgacctgcgcctggaagctgacggtgcgttccttgtggttcacgatcacgttgcctatcttgatgcggtgctcgtccaggggttcgaatttgggtaccgtcttgccgtccggcagggggacttcccggggggcctcctccggtgcgggcgcatccggatctcccgccggggcggaaacgtcctgcgcatgggcaaagccccaggagcaggcaagcagggtgatcgtaaatttcaggaacatgtttatggaaattagattgtgaaaatgaaagcttccgttcaatgaaaaaggcatccgtgattgatttgttacttttgaatcacggatgcctggaaggaatgatggagggagcctaaaccagtttcagcctggcaaggtcctgaaggtcgacgatgcccacgggagtcatttccgcgttgagcaccaccaggtcgtcaatgtggcggttgctgacggccttcaccgcctcggcggccaggtcgtcttccatcacatagatggggttgcgggtcatgaggccgctgacgggctgctccccgatgaggggattggctccgtacgcgcggacgaagtctccgtgggtgaagatgccggccagcttgttgtccgccgtcagcaggatgcaggcgccggtgtgggcggtggtcatcgccttcaggcagtcgttcacggaggcggtttccggaaggatggccatttccttcccccggcgcatgatgtcgctcaccttggtgagcagcgcgcggcccagggagccgccggggtggcgtttggcgaagtcccgcgcggtgaagtggcgcgcttccaccagggccatggcaagggcgtcccccatgacgagcatggccgtggtgctggaggtgggggccaggttcagcgggcaggcttcccgggaaacgcccgtgtccagcacgatgtccgagtatttggccagggaggaggccgtattgcccgtcatggaaatgatgggcagttcaaagcgtttgatgaaagggagcagagccagcagttccgaggtttccccggagaaggacatcgcgatgcagacgtcgccgtcctggacgatgcccaggtccccgtgcagggcgttcagggaatccagcaggacggtgggcgttccggtggagttcagggtggcgacgattttggctccgatgttgccggatttgcctacgcctacgatgacgatcttgttgccgcggtccagggcctgggacatgagttccacagcctggttgaaattgtcatccagccgggacaggacgccgcgcagctcttcaatctccatttcaaaaacggatttggcgcgtgttaaatgattcatatctggcgggaatgatgccagatgcccccatggccgtcaatttttcattgcggctccgcggtccccgtttttccggcacctgcacgcgggattggctgccagcggaatggtggtgaagcgcatgcgccgcgtgtctgcggagagcatggctcccaccagcggagaggggatgccggccaggtatttcagggcttccatggcctggatgcagccgatgatgcccgcatgcgcgcccaggatgccggcggcggaggcggtgtctttctcctgcatgggcgcgtctgccgggaagaggcagcggtagcacgcggtgccctggtggggggcgaagacggccacctggccgataaagcctttcacggctccgtgcaccagcggcaggcgcagggcgcaggcggcgtccgccatggcgaagcgcgccgcgtagttgtccgaggcgtccaggaccaggtcgcacccttccagcagggaaacggcgttgtccggagtgagccgcctgtggaccgtgttgatgtggacggaagggttcagggcgtacaggcgcctggcggcgctggcggtcttggccgttcccgccgcatccgtggcatgcaggatctgccgctggaggttggaaaggcagacctcgtccgggtcgatcagggtcagccgccccacgcccgcggcggcaagataaagggccgcgggggagccaagccccccgaggcccgtcagggcgacgtgcgcccgtttgagtttttgctggccctgttcgcccagttccggaagggaaagatgccttgcgtaccgttcggtttcttcctgggtgagggtcattgctgtcgtcgggattaacggcgggcggagttgccgctgaaggcgtacaggagcagcgtccatccggagaagatcagttccactgcgatcagggtgccgatgaaccaggccgtggattcaggccagccgaagatgaccatgaggcccaggatcagcgtgatgatcacgttgaagagccgccagccgctggcgggcagggaacgggtctggagccagatggccccctggaagacggcggcgatgaccaggccccacccgatgatgagcgtggtgatggccagggaaatattggggtcccggaacaggaaccagccggcgatgccgtacaggatggccgtcaccaggttccaccagcgggaggacgggacggtgaagacctggaccagccggacgacggccaggatcatcagcatgatgccgatcacccagatgaagctggccccgacaatccagggagaggccagggcgatgaagccaagaaatagctcgatgacgccaaggatacccatccaccatgagttgccggataccgcggagctgctgacttgaggttgagttgtcatatggcggtatgaccggacccgcggcggaaacgttgaagaatgacgattttatttgccggcggatgcctgcggcggagtgttcttcgggtccatggtcttcagcagctccggagtgacgttgatcagaacggggccgcttttggggtgcgcctggggggggacgaagtaggaaaaggccctggcgggcagttgtcccgggatttccggcatgatgtaaacctccacgagaacggcgccctttttgccgttagggctgtcggaaaagttcagcgtgagggagttggttccgtccctcagcccgccggaaatgatttccgccaggcgcgtgttgtcgaattcatgcggggaaatgttgtttacgttcgccttgacggtgcggccggggcagtccaccagaatttttgcgatgtatttgggcggcgggcagacaggcggcacggcgggaatttttccaaggggctggaagccgtcctgctccatcaggacagtggcgtcgccgcgcttgaggcgttccttgacggcgggcaggcgggtgaggttgaagaagcgcgcctggtcgtatttccatttgccgttttcatgggtgaacagcaggaccagagcgttggagtccgtcggttcctggcccagccccaggtccaccttgccgtagtaggtggccgcggccgtgggaccgtccaccacggagcccacgtacatcagtggggcgagcgcgggcggagccatgggctgccggaacagggaggcgggaaaggagcgtttttcagagacggccaggttgcgcactttcacctggcggtaggcggaggtggtggctctccagccgtcatagttgccgcgcagcaggtgcaggcgccatgtgttgtaggctacgtccagatcgtccctcagtttggcgtctccgggccggggggcggcggaggcgggggcgagaagagctgcggcgcagcaggccatggtgagaatggagcggaaagtcattacacgattatttagacatcaaacttgcgcggagtgcaacacaattgcatcatgaagccgttcttatggaattgttcacggaagccgatcatctggcggaagcccggtacaggaaactgttgcgggaacagcccggctttgtgtggaggcggttttcagacggtgaggagctgatggcctacgtcttttttcctcccggccatcgagagggcgcttccgcgccctccgtgctgttttttcacggcggcatgtgggtgggaaagagcctgggggattttgtgccatgggcgcttcaccttgcccagcagggaattgtggggattattcccatgttccgtacgcgcggcgcttatgaggtggagccgatggatattctggaagagggccgggaagcctgggcctgggtgtatgaaaacgccgccctgctggggctggatccggcccgcattaccgtagcggggagcgatgcgggaggactgatggccctgcatgtggccctccccgaccatcccgcgcgctggtccctgttccgcaggaaggcttcccttccgcccggtcccgccgccgtggccctgttccgcggcgtgtgcgacctggcggcgcagtccgcctttaaactgggaggcatgatgccccctgaccagcgggatgccgtcaatcccctgcggcgcgtgcagaaagggctgcctcccctgttcgcgagccatggcggaagagacaggctgctgccgtggcgcaacagcgagcggctggcggagctgtggcggaaaaagaaaaaccgctccaggtttgagcttctggacgtggcggaccacacgttttaccatttcaatgtaaatgccgcctattttgagcaattgctcaacagttggagttccttcatggtggagcagggcatttgggaatataacgagggaatggacgcgggccttctcggctgaacatgctgcggaaatcccggaacgttttccgcgcgtcctctgttcagcggcagatgggcctttccatttttcggctgagtaaaaacgaatgggaaatggcgttatggatggtctttcatttccttcatccactttaccaccttgtctttgtcacaacagaaataatgctctggagaaagatcgttttccgtctccatgaagcgagtatagctgttaaaaacattcagccagtcaataccatttttaagaacctccgcgccctcttcgttccgggatgacaattcgtcagcaaaacggatggcctcttcatgaaatgattcaaaggtcttaatgctgtcagacgaataacattcctctacaaggaagccgtagaccagacattccgctttccaacaaatctcgggagattcggaaacatcactattgataaacttaaaaaacatttctttgttcttatggtttcatatgctgcaaggcgtcctgtcccccatggtccggggagaggcggttttattttcggccgcccagcatgttttcccggatttcctgcatgtcccggcggaacgcgggctgcgtctgcggggtaggcggctggatatcccattccttcatctttttgcggaccttgaggaatgcctcctgctcgctggcgccgtatttcttgcagacggtggagagggtcagttccggtcccgtgaagcgacccttgagaaagaaaggcaggtcatgctgccaggcgcgccggaagtcctccgggcatccgtccgtcctgatgggggcgaacagttccctgacctggctttcccggatgcccgcggtgttcatgcagatggcggtttccatgtaggccagcgtgaatcccagcatgacccgttcaatggattgcctggcccgggccagttgggtaggggtaaggcccatgacctgggcgcgcagggcggccagggcttccaggatggccttggggtcgccgtaggtgcgcggatccatgcgggggatttgttcatcctcgtcgtaaaggggaatgggcggatgcacccgggaattgatcttgaacagtttgccctggagccgttcccggaggtccttcaggctgacgccgtacttgcgcaggacgggcgccgcgtaattgcgccccggcttgttcgtctgccgcagccatgcttcctgaaaatcagcggggcattgctgaaggcccgccgccagcatggcgttccggaagtcctccgccttgggcgttttattggcataggcgtgggtccattccatttccagcatccagatggcggtgaggcccaggaattgttcaatcgcctgtttggcctccgcgggttccggtgcgggaagtcccgccggagcggcggcggaggacgggatgtgccagcagaacgggaacagcagggcgaaagccaggaacgggcgcagcagatgcatggggggaaggaaagaggggtgggaaggaacggcagagctcattcggctgtcacggtaacgtccagcgggcgatcggaaacggggaattgcaattcataaaagccgttgcccaggttcttgacgggaacgttccctgccttcacggggcttttccctcgccagacgacgaccgggccggattccttcacgcggaagcggaggctgtccgccccgtattccggagcggcggccagggcgcagggagagaggaatttgtcccccctgccgatgacggcccaaccccggacgatgggcgccatgatgaacaggcggtccttgaagcccgttagcttcacgttcaggtccggctgtgccggagtcagcgcgcggcctccctctgcggaataggcagcgattccctccgccggaatggaggcataggcttccgccgcgttgccgttcagcagggccgccgcgtttttataatcccccagggaaattttcccctgcaccggttccgccggggaggggtgtttgaggttgtacagcaccacggcggcgctttggccgggcagcggggcgatcacccggtacaggcggttctcgttcagcgcatccagaaagacggaatccggcagggggacggcaggggccagcggccgcagcagaaggccgtcggaccagaccaggggcatgatgttttccggattgagcttgtcagccgggtctgaaaggtagacggggcccccggatacggccttggaaacggccatgaggcgcgcgctggtggggtccgtggaatggaacatgtcatggtccggccacgcggtctgccccagccagagcgtattggcgtaggactggaggatgtgggacttgcccatggcttcatcccccagcttgtagtcaatgctgcaccgggtgatagcgctgtagcgggtattctggatgttgacggcgccctgcgccatgcaattcatcaggctgaggcccgtcttccggcatgcctgttccagggcttccgaacacttggtgttgtggcggaccgggttgtccaggccgtccgcatgcttcaggtattccgcctgcacgtcgatcttcacgaagtcgaacccggcgtccttgacggattggagaaaagggttgtaaaacgccccggctcctccggggccgtcaccggggaggattttccccttggtagtgctgaccagcccgcgggccgtctgggcgttcagccggtgcttggggtggatgccgttccagaggccgtaatagcagttccacaggcccatccatttcaacttggagcttttgtgcttcatcaggggctgccagccctgggggaacttctcctgattggtctggaaactgatcagtttaaggtccttctgggtctggaagccgtcatccaccagtatccaccggacgggaatgggggaggtctccagctggcgggctgtctgttcaagcagtttggaggaaatattctttttatactgctcccagctgcaccagcccaggtacttgaacggttccggataggcctttttttcacgggggaaggttcttcccttgatgaagggaagggagagggccttgttccatgcggcggaacaggcgcggtaaatatccttgtccacggcggtgacggccaggacgggttgcggttttaccgtggaagttcccagcgttccgtattccaccagaaacctgccgtccccgtcaagcttcagccacgcgagggaatcaggggtggcgacgggcagcacggccatgaaattgccgtccttgaggtggaacagcgcaaacatggcgtggtcccccggtttggcggtgctggggttcggcttgctgtccagcaggttgccgggagctgtcttgccgaaccagggcagcacccggttgccgtctccgggccagcggccgcggtccgccgcgaaccagcagaaggactggtagggaggtacctgaagggaacgcgcgtttttttccggcagcgggggaatggtggatatccgggtttgggcggcggcagtccagatgctcagggccgccaggacaagagccgggaacgtgaatgctttcatgggaatcatcattaagttaaggacagtggtggaaggggtggcaggaagccgctgtggggtgtgcgcctctgttcccaggaaaaagacgctgcattatgatggcagggcatttgccggagacgagaaaaaaatgattttttcgttccgtttcccttctttttccgtatgaaatacggattgtgaatccgtggtcaatttaaaaagagggggcattcctggttttccaatgggttcatccctcgctaacggattatatgccgcttcctgtttaagcaaacgtatcggcttaataaaaataataagctcttattaaatgtattgcatcattcatgaaattttacggattcacaatccgatatagaaagaatcaggggtgcggttacatgtctgaatttttgatcgcaaagcgctcattgtgattgttttgtgaatcgtgacgtcaagaactgcaaccgttggttccccgtttaattcctgatattatgaagaaaactctatttattgcttgctgcactctgattgccgtatccggtttaagcatggcggcaacctatcaatggacgggcaacggtgacggttcctcctggacggatgcgggtaactggtcggagtccggggtgccccccaccacgctgggtgcgggaaacagcatcatcattaacagtgatgcctccatatccaccgccggagccgggaatctgaattacaagggtattgatcagcttgtcctgaagggtacgggaaccctgagcaacaacacgggcggggccttgattctgggaaatgtggagatggataaatctttcactctgaactctggcaatactcagctctggggcaatctgacgattgattccagcatcaattcgggggctctgggcggggggctgtctgagggggatgtgtgggatttcgggctgaacgggcgccttgcgacaacaagcctgtggattaatgcaaacggaggaaccattcaggccgccattgatccgtataccaccaccggaacctttgggacggcagtgcgagaacttttaggtcagaacgcttcctcctcctcgggcggcaacggctttgatacggttgactatgtggtcagggacgctgacgggaatatcctgacccgtgcggacggtccgctggaagctacggaagaaaatgtgggcaagtattggatcaccaccaatgggggagcttgggccaacgtgaagattcattacatcaccggagcggctccagttccggaacctgctgcggcaggcctttccgccgccggtcttctgctggccctgctgcgccgccgccggatgcgttgagccaggcgttgctgtccggactggttttcggaagcgcctctcctgcacgggaggggcgtttttgtttatccggtcatggccaccgtttttagcggctgtccggttctccggatgggagtattcataacggggtgtcttccggagagagccggcctcatggccggaaatttcatccacgccgtcacttggccgggcttttggcgaaggatatgcggcgcctgtaaaaaaagagcagaaccagccattgcagcaggagaagggaaacggcgagcaatacgggctggaaaggcgggaagaagtccgccgcgccgctgaagatgcgctggttgagttcatgcacgttgagcagggcgtggatgaggtaggcggccagggcgttgacgccgatgacgcggaggggaaaggcccatttggcccattttccgccgttccatgcgtcgacggccagatggaacagggacaggagcatcagggagattccggcagcggccagaacgaaggtgccggtccacatgcttttaatgatgggataggcgccgtccagcattcgggcggcggaaaagaggaggattcccgctcccatcatcgccatgcagaggcggacggaaggcaggcggctttccttcaaaaattttcccgccagccatccgcccatgcacagggcggaagcggaggcgatgcagagggggccttccggatcaaagacgcctccgtgcagacggccgggaagccagtgcatgtccacccaggagttgacggagccgtccggcgtgaagctgccgcaggtgaattgaagcagggcgatgaggcccagaaggcctcccgccgccgcggcaatcgctcccgtgcggcggcacagcaggatgcacgtgcctgcgatggcgcaggagaagccgatcaggcccagaacggaggcgtaacgcatatcctccgtccaggtaagcgttccgttgaccaggaggcccaggaaggccagaacgaaggcccgtttccaaaggtggagaaggccggaggccgcagaggcgtttccgccggtgtatttcgccagggagaaggacatggaaacgccagagatgaacacgaagacggggaacaccaggtcatacaggtgcaatcctgcccaatgggcatgcgacatctggcgcgcggcttcccggaggaaggcgttttccggatttctggcggccaggagcaggaccagggcgtctagccccaggatgatgagcatgtccagcccgcgcagggcatccagggagtgcagccggggggaacgggcgggaacggaagaggaggcggtcatggcggcggggaggaagaacgggaacaggtacggacggaaaagggcgtctttatcaggattcctccaaacatgccggaacagaggggaatcgtgcttgatttccacgggggaagagggtaaagcaggccgcatgccgcgctcccctctcgcctttctccttttcctgtgtgtctccctgctgctggctgcctgttcctccacgcccaagactccgcatggcaagccgttgatgaaggacggcaggtactcttcttcctatgacgcttttgtagcggacccccagtaccgcttcacgcgcgacatctggtaccatgacgagcgcatccggcaggcgcagacgcggaacagcaaaatcgtgattcatttgaaggaccagcgcggcgtgctgtgggtcaacggccagccggccatgaactttcccgtgtgcaccggcagatccacccatgagacgccccgcggtaaattctccatcattcagaaggacgcggactaccgctcccggtcctatggcagcgtgtttgatgcaagcggcctgtgcgtgaattcggacgccacctcttcttcccgcgtgccgtccggcggcaaattcatcggcgccaagatgccgctgtggatgcgcattcacggcgggatagggctgcatgtgggcacggtgttccgagacgccaactcccacgggtgcatccgggtgcctgtggaggcatgccgcattttgtttgacaaatgcggcatgggaacaaccgtagtagttcaggaataagcgcgagcgtgaataatcgttgattccttacggtgcatctgtcacactcctgcaagctgatgaaaatgaaggttctgatacgttccctggtattgctggccgggttggccgcctggacggcggatacggcctggggccagtcctcgtcacgccattcgccttcccgcgggggaacgcccgtgcgccaggctgcggcgcagcagcgcggagaagatgacgccgtggaaacggttgacctgggggataagaagagggaatccggcacggcgtccggtgaacgggaaggcgtggctgacgccccggaaatgcccaaggaaacggagaaggagcagaacggcctggattccctgtccctgattccctccctcaaggggggaaggatggatgcggcgcgggaagcgcacaccagcacacggccttccgccagaaccatggccctgctgattccggctccgcgcggccccattctggaccgcaacggagagcctctggccgtgacctccgtggcctaccaactggccctgcggtttgaaatctttgaaaatcccgaccgttcccgcgtggtggacttcgggcgcaactgcctggaacaggccaagaaaattgccggaaaggcgtggtccttttccgatgaccagctctggaagcactatgagcaccgccgctggctgcctcttcccctcactaacgtcatccgcgcggaggaagcggaaaaactgagggacaaggtgaagggggtgcgcggcctccagctgctgcccatctacatccgttcctatccggaaaaggaaatcgccggacatatcatcggctatgtgggttccaagggaaaactgcctaccggccccatcaaccatatggacccgctgtgggaacaggtggaaggccgcgcgggactggaaaaggaattcaacaaggacctgaccgggacgcccggcgtatggcgcctgatgtttgacgaggacggcaacaagattctggatgaacttcagatacgccccaagcccgggggcgccatcgtcaccaccctgaacctgaaatggcagcgggatgcggagcgcatcctttcccgcggcaagaggcgcggcgccatggtggtgctggactgcgtaacgggtgaagtgctggtaatggcctccacgccgtcctatgacccgaacatgttcattccgaacatatcccagaaggattacgatgccctgcgcaacgaccccgccggaccgctgggcgcgcgcgccttccaggggcgctacccccccgcctccaccttcaaggtgctgacggtggccagcgccctgaaaaataacaagatcacggaaaatacgcagatctactgcccggcatccatcacgatcggcaaccacgttttcaacaactggagcaagacgcccctgggggacatcaactgcatccgcgccctggcgatgtccaacaacccgttcatgtaccagatggggctcaagctgggagcggaagccctgatggatacggcccgcgccttcggacttggcgagcgcaccgggctgcccattccggacgatcccggcctggtacccaccagcgactacatgatccgcaactacaagcgggatttcatgtccggagacgccgccaacctttccatcggccagggaacgctgctggtcacgcccctccaggtggcgcacatgatgtccggcgtggcgaacggctacctgcctaggctccagctcatcaagcagattcaggacggcaacgccaatgtcatttacgctcccaagccccaggaggtccagcgccccctgcctgcctatgaacgtgccctggccagcgtgcgcaagggcatgagggaggtgattgaaggcggcacgggcggccgcgcccgcctgtcctattccagcatcgccggcaaatccggcacggcccagtggggaccggaacgggaagacaagcgcctggcgtggttcgccggctttatgccctgtgacaatccccgcttcgcctatgtggtgctgtatgaaggccgcgcccacgaacggctgggcgggggcgccgccgctgcccccatcgtgaaggaattctttgagacggagaagaaggacatcaaggccatcattgacccgcccaaggacgacatcccggtagcggaaccggtggaggaaaccccggaaacggctgccgccgcccttcgcgaacacgggggatcgcctgccgtagtgccggacaacctgccgcccggcctgtatgatccggaaggaatggagcccatcaaggttcatgaaatccctgccgatctggacgactcttccgatgcggaaatcaaggcgaccccggtgggcggttcctccgggcatgccaggccgtccgcgccttccttgtcggaggagccttccgccgcacccctcacgccccgacgcggagattccgactacattcccggccttccccatcagattccccgccatctcaaccattcctctcccgtaagagctcccgcgccgcaggccccccttccggaggatgacattcccatggcggaacctctttaggccggcttttaaggaaggcggaatcgtccggcaatgcttttcagggcgttcgccgtaacaaggtcatgcatggcctttggcccgttaatgcttttcattgtgcttgcgtcattgcgtggaagcgcctatataatgcggatggtgcgcgtcgatgagactgttgccgtaaggagcggcgcttttgttggatggcatcatgacccccacgtttaaagataatgaaaacgcattatttctactccataccctgttttgcgctgacctgcgctcttgccgcctgctctgacgacaataaatcatcttccgccaaggccggacaggatgccgccggcttaaccccggcttcttcgcttgatccctccgcccccgttgcttccgatctggtggcgaagcgtgcggaacggctcggaatcgccgccctctttcccatggacatgggtattgtagccggtgtttacgacgtccccggcatgatcaggagcgttcagaatctgaacatggtcaaaacctggggttcctgctccgctggggaagacgccgatgaatccatagccattccgggagaggatgcacccaagcccgtccggaaaaagtgctccgtcaacacccccgtcattgacgcgatgatcggcttcggccccgaatgggctccgtggatggatagcgcgcagcccgcttttaccggcatggggctgaaccagatgcagggaattttgtccgcttacaagcttttccaggcctccgctgatggaagcaagggcgccagtgacacggcccaggaggcaatggtcaacaggtacgttgagatgcttatccagtgggctgatttggtggatctgcgcccttccgaggctgctacggcgcccgtgatggtagccgccaaattgactccggacgccctggcccaggccaaggccaccctgaaggacgccaacctcccggaggacatggaacttcatggactggtttccctgtatgacaagacctacaacggcctgccctgcaaggtggcggaggtggactgcaagaaactgcgcgtgaagctggaagaaaagttggatgaggcaaaatccaagatgaacatctcccaggaaaacctggaccgtctcaaggcggctctcaagcgtctggacgaatccaagctgtatgtggccgtcgctttcgtggatgataccctggtgggctttataaccaccaatcctgaaaagcaggtccgcctggcggcttctccccaggattctgttctggcgcgtccggatttctccatggctgacgcccagctccagtatcccgcctatggcctgatatttgcggacaaggcttgcgccaagggccttattaacctggacatcgcctactacaagggcatgttctccgggttgaaggacctgatgcagacggtaggcgccgactggaagattgccgatctggctccttccatggccgcgcttgattccatgaagggcagcctccttgggctgtatgaaaaggtggcgcagaatgccacgcccgtttcctactacgcgtggcaggaccagggagtgcatgtggaagcctgcacgtatccgcttgaattctacctcctggacgctccctcctccatgaactccgtccgtcccggggcggatacggtgctgtattcttccttccgcatcaatccgcagattgttgacatgggctgctccctgtatgagaatgttgcccagatcgtatgggattacggcaatgcgtatatttccaacccgaagcatgacgtaagcgaccagatccgcatggttgtccccatgctccagatggcccggcccaccattgaagaactttggaaggcgtataagaccgcactttccggccttacggattccggcgtgttcatcatggacatgcagggcgctcccagccccacgctcaagaatgttccggccccgcgcttctccgcggcttatgaagtgaagaaccgtgccgccttgggcgaagcgtggcagaaagtgtctgacgccgccaagaccatcgttaccctggccagccagggcaagatgacggaattgccctcccccaaatcctccgtggaaggggatgtcaccacctacgattacgagtgcccgctgggcgccgacctgaatccggtggtgagcgtttccgacacccgctgggccatcagcatgccaaaggccttcggcatggaagtcatcaaggaatccatgaaggccccggggcaggtggctccgctggaattccagcttaacctcgtcccggtccgtgacgccctgaagagcgtagcggaaggcaacaaggatatccggaaggccgtggaaaccctggacgtgatcacctccgacgtcacgggcgtgcatgctacagggcgcaaggccgcggacggcagggacgtgtatcacatccacgttatttccgctgccaaataacaggggtttcccattggatttacaggcttccgggaagaaatttccggaagcttttttgttgatggcggaagcttcttgttcctgccgttctggaagttatctccggaaaaattttttaatgcccggaagaaaaaacggagttttgcaacggcaagcctgccgccgccttaagattatatacaaatgtatataatttgtgcgcgtgccaagttttgggcttgccaagggggaggggagagtacacaatcaaaaccgtcaaataaagggaatggcttcccttttcccgtatttacaggagttggcgcgataatggtgaaagatagacgatgagcagatttttccagttcctgtggttggcggcgttggcggtgcccggcatgatgggcggcagcgcgtgtgcggcggaggaaggagcggagcacggactggagcaggccgccccccacttgttctccattccgcttccaggcggcattgaactgccggtgtccaactccatgctgatgctctttctggcggttctgctgataggggtggtcgtatggttcgccacccgcgccatgcgcattctgccgtcccggttccaaaatgcggtggaatacttctttgagactctgtacaactttgtggaatccctgctggggccgcgactgacgcgcaagtacttctggtacttcggaaccatcttcaccatcatcctggtcagcaactacatggggcttctccccggggtagggaccatcacctataacggagtgccgctgttccgcggcgcgaatgcggacatgaacgtgacgatgttcctgggcatcttttatgcgctgatgtggctttactggtccatccgggaacagggcctgaaaggcttcttcatccacttgttcgggcccaagggaagactgcccggcttcatgggattcgtgctggtgctcatcttcatcttcgtggggctggtggacgtcctgagcattacgatccgtcctattgcgctggcggcccgtctttacggcaacatttacgccggggaaacgatcattgacaccatggcccacatgttcggacccgtcctcagcgccctgtgcgtactcccgtttctggcgattgagctgctggtgggcttcatccaggctctggtcttcctcctcctgacggcgattttcctcaaactgcaagtgggggacggggatgcccccggccatgccgccaaggatgagggaaaagaaccatccgtgccggacagcctgccgtccggaaaggcctcataagccgcaccgccaactttccgttccggaccatgggcaacctgtgggggaacgttcaacaaaaaacataaaccataccaataacatgattgatcctaccgcaatgacctccctggccgaactgtccggcaacgtgggcttcggtctcgtcaccatcggcgccggcctcggcatcggcctcatcggcgcgaaagccgcggaagccaccgggcgcaacccgggagcctcctcccccatcatggtgattgccattacgctggccgccctgattgaaggcgtggccctcatctccatctttgtgaaataacccggaggccccgttcccggagggagcttcttccgctccggggcggcgcagccattcctgccggtccggaaaacttccggcatgtttcaacccgtccattttatgctgaatctcatagccgaccagtcctggaatccctttgcgcccttcggggtgacaagctgggaaccctttgttgccaacctgatcgccttcatcctgatggtggtgatcctgcgctacctggcgttcaagcccatccagaacgttctggaaaaaaggcgccagcgcattgaggagggagaggaaatgcgtgaggaaagcgagcgccagctggcttccgtgaaggaacagacgcatgaaatgctggtggaagcgggcgaaaagggacaggaaaagatagacgccgccaaggccgccgcctcccgcctgctggaggaacaggaaaccgtggcctcccaaaaggcggaggaaatagtcagaaaggcccggcagcttgcggaactggaacagcagaaggaacgcgaagcgctgaaagaacaattcggccagctggtggccctggctgccgcccaggtcaccggaaaaatgctgacggaagaggaccagcggagaatcaaccgggaagcgatcgacagcctggattcctgatacgctttatgaagatcggaaaggacacgctcaatgccgcccgcaggctgttccggctttgcatggacgggaataccgtggcggaggaccgcgtgcgcctgatcgcccggaaaattgcggaacgcaaaccccgtaactatgtcgctctgctgacggccttttcccgcatggtggaatacgccgtgaaaagccgtacggccaccattcaaagcgccgtaccgctgacagaggaggaacgctcccaaattcaagccaagctgacggccaaatatggcgacggcctctactaccactgggaggtggcgccggacctgctggggggcatccgcatccaggtgggggacgacgtgaaagacggttccgtacgctccagaatcgaccgtctggccgagatggcccgcaatctttccaattaaccaacgaaacttttttccatgagcaacatacttcaagaactcgaagcagaaattaaaaaagccacggcttccgtcagccaggaaaacgtgggcgttattcgttccgtgggggacggcgtcgccaaaatcgaagggctgagcggcgtgatgctcaatgaaatgattgagttccccgggggcgtgatgggcctggcgatgaacctggaagaacatgaggtgggcgccgtgattctgggggatgattccaatttgaaggaaggggacctggtcaaatgctccggacgccttctttccgtgcccgtggggcggtccctgctgggccgcgtggtgaacacgctgggagagccgattgacggcaaggggccgattgaggcggaagcgtattatcctgtggaaaaaatcgcctccggcattatctcccgccagtccgtcactgttcccgtgcagacgggcattctgcccattgacgccatgattcccatcggccgcggccagcgcgagcttatcattggggaccgcgccaccgggaaaaccgccattgccatggataccatgatcgcccaggcggaccagaaccgcctggcggaggaaggcaagctgccggaccaccagcccctttacaacatctacgtggctatcggccagaagcgcgccaacatcagccgcctcgtggcaaagctggaagaaacgggcgccatgaaatactccatcgtggtggcggcctccgcctcggaccctgccgccatgctgtacctggccccgtatgccggctgcgcgatgggcgaatacttcatggacaagggggaggacgccctcatcgtctacgacgacctctccaagcatgccgtggcctaccgccagatttccctgattctgcgccgcccctccggtcgcgaggcgtatccgggggacgtattctacctgcacagccgcctgctggaacgcgccgcgcgcatcaacaaggaacacggcggcggctccctgacggccctccccatcattgaaacgcaggccggggacgtttccgcctacatccccacaaacgtcatttccatcacggacggccagatattcctggaaacggacctgttctaccagggggtgcgccccgccattaacgtgggcatttccgtctcccgcgtgggttcctccgcccagacgaaaatcatcaaaaagctggccggctccatcaagctggacctggcccaattcacggaattgcaggccttcgcccaattcgggtccgacctggaccccagcacgaaggccaagctggcccgcggccagcgcatcgtggaactcttcaagcagaaccagtatgagcccaaatccctggggctggaggccgcggacctgtacgccatgcagaaggggtactttgacgatgttccggtggacaggatcaaggaatgccagaacgcgtgggaagccaccatgaaggaccagcatccggacctgctggaaagcatcctgagggaaaaggatctgacgccggaaatagacgcggggcttaaagccgccattgaatccttcaagctcagttggaactaacgattacgggagcactgaaacatgggcaacctgagagacatcagacgccggatcaaatccgtcaaaaacacgtcccagatcaccagggcgatgcagatggtggcctccgccaagatgcgccgcgcccaggaccaggccgtgaaggggcgcccctatatccgcgccctggcggaagtgctctaccatctccaggatgaaatagacaccagcaacagccccctgatgcagatccacggcggcgcggacctggtgctgctggtgaacacggaccgcggcctctgcggcggcctgaatgccaacctcatcaaaatgacccgggagcacgctccggaaaatgcccactacatcaccatcggccgcaagctgaacgccgcactggccaaatggaatgaacggctggaagccacctggagcctgacggacccgctctccctgctggaactgaagccggtgttcgacttcattgtgcagaaattcaaggcggaggaatacgggcgcgtcttcgtagccttctccggctttgtgaacacaatggtccagaagcctatcttccgccagcttctccccattgaaccggaaccgttgatgaagatggcgaaggccgggggcgcagccctggacggagaagacgcccataagcaattcctgctggaaccgagccccgccgccctgctggataccatcctgcccctttacgtcttccatgggctggtccagatcgtgctggaagcccgtgcatccgagcactccgcccgcatggtcgccatgaagggggccacggaaaacgccaaaaacatcatcgacggccttaccctggattacaacaaggcgcgccagacgcaaatcaccaatgaactgctggaaatcaccacggccatgcgcgccatggaataacgtggactccgcttctttcacccctttttcaaacaaaaccctcatcccttccatttcaacaccaagtttttctcatgatgaataacacaggcactctcgttcagatcatcggcgccgtggtcgatgcggatttctcccaggctgaaacgcttcccgccctgctcaatgccctggaagtggactatgaagtcgacggaaagcgcaagaccctggtgctggaagtccagcagcacatcggcgacggctgggtgcgcgccgtggccatgagttccacggacggcctgcgccgcggcatgcccgtgcgcgatacggggcaccccattgaggtaccggtggggcagtgcgttcttggccgcatcttcaatgtgctgggtgaagccgtggacgaacgcggcgcgctctcctgctccggcatgaaaagcattcaccgcagcgctccgccgctggacgagcaatccaccagcacggaagtgctggaaacgggcatcaaagtaatcgacctcatctgccctttcctgaaaggcggcaaaatcggcgccttcggcggcgcgggggtgggcaagaccgtgctcattatggaactcatcaacaacattgccaaggcgcgcagcggcctctccgtctttgcgggggtgggggaacgcacccgtgaagggaacgacttgtacaatgaaatgatagaatccggcgtgattaatctggaaaagccggaggaatccaaggtggccctggtatacggacagatgaacgagcctcccggcgcccgtctgcgcgtggccctgtccgccctgacgatggcggaatacttccgcgacgaggagcacaaggacgtacttctcttcattgacaacattttccgtttctcccaggcggggtcggaagtgtccgccctgctgggccgcacgccgtccgccgtgggctaccagccaaacctggcagaggaaatggcggatcttcaggaacgcatcacctccaccaagcacggttccatcacctccatgcaggccgtgtacgttcctgcggacgacctgacggacccggctccggccaccaccttcgcccacctggactccacggtggtgctggaacgctctttggcggcccaggggctcttccctgcggtggagccgctatcctccacctccaaggccctggctccggaaatcgtggggaacgagcattacgaagtggcgcgcggcgtgcagatggtactgcagcgctacaaggaccttcaggacatgattgccattctgggcatggacgagctttcggaagaagacaagctcatcgtgagccgcgcccgcaaaatccagcgcttcctgacccagccgtttcacgtggcggaagtcttctccagcattcccggcgcttacgtgcccgtctcggaaaccgtccgcggcttcaaggaaatcctggaaggcaagctggacatggttccggaagacgccttcttcatgcgcggcggcatagatgacgtcctcaaggaagccaaataacccttttcccgccgttccaaaccatgagcatggagttcaaagtcattaccccggatgaagtggcggttgccgccaccgtggaatacgtttacctgcccggcagtctcggggagatgggcgtgctggaacatcatacggccctgattacctccctggaaccgggggaactccgctacaagcccatggacggccctgaggaaagcatggtggtgggcaccggctttgtgcaggttaatgacgaccacgtcctgatggtgaccgacctcgcgctcaactcctcccagattgacgaaggcagcgtggaacgggccattcaggaagcgcaggaagtgttgaaggcccgctcggaaatgtcccgcgaggaacaggcccggtttgaggcaaacctgaccaagcagatcatgatgctcaacttcaagcgcaaacacaaatccccgggcagatgatggcggaagactggaacgacacgttttacgaccttttccgcgaggcggtggggcgttaccatgaaggccacaggaatgtggacggcttctttacggaccaggaaatcatcttcctgtcctccatcggctgccgcacgcgggaactgtttgactttgtggaactctatgcccgcacgggagaaccttcccccaccacagtactattgatggccgcggcgcgcagggacttcttcctgaccatccagcacgggcagttttaccagggcaagcccgtcatcgggtatgacctgccgggcttcggggatgaactcagcggccttccctaccttccgcgcctgattgccaaggcgcgggccaagctggccggctccatgggggatgacatcatctactgctgtgagaacgaccgccgcttcttccgggaacacggcaacatccatcccgctgacttcctgcgagtggtctgggccgcgggagacagtgaccccaaggtgtacgactacgtgcgccagtgcacgctgagttccacggccaaaccggtcgatggtgaatgatgtttctgcatcgtgacggtgggaggaggcttggtgaagcagagcgtttgtagaactgtcgttcggttagacggtgcttccagggaaatcttataggaggaaagaaagttcgctgaccggcggtatctagcgtcctggatatggatgatcagatgtcttgtgcttgattgggactttaaagctggtcgctggaaaaatctgtattgtcgccttgattaatcaagaaaataagaagaagtattatgtattttacgaaatacctatgttgataatattatcgtgtatttgaataccataacgttcgcggcgtgttcacactggtaattcttgttctcatggtagtcgcaaccattgaaccaacatcatttcattgccatgaataacactttcaatatcggcgccatggacaccgtctaccccttcattcccatgtaccccaacggacagccccagggcaacttcctggtcaacggcctcaccgctcccgtccttatccccaaacgcgctgcttcctctcccacccgtcacgaatagtccggatacctcaaggtcatggctcctgccacctgttttctccaccttcacgcccactcttccatctccctttccattcccgccaaggatctggaactctccacggaggccggttcttccgcccctctccgccgccagatccagtttgaccagggatactactggtgccatatcgtccatcaacaccagcccgaccaggagtcgcaagaggagttctgcattgccttaatgtgcgacaaggaaggtgagcctgacctggattattacctgctggcagagaccccgccggccgacaaggaaggagaaacggtgctgacgctggtcaacctgtaccaggagatggaagaaggggattcgtcgagcagttcggcggggggaggagattcgtttgagtttgatcccaagcccagcagcagttccagctcctcctcgtcaagcagttcgtcttccagcagctcttcgtcttcatccagtttccagccgagttcttcggctcccgagcctccggattcctccagcagcgctccgccttcttcttccagttcgtcgtcctccagcagttcgagttcttcgtcctcaagttccttgagtagctccagctctttctcgtcaagcagttcttcctggtcctcgtcaagttcatcgagttcttccagctccagttcctcttccagcagtagttccagctccctctcttcttcctccagcgagccggaggaaggagggctgtccctgttcctgtgattgcgacgaagacgtcgaacagtccgattgcagcaagaacacctcccatttcttcggcggcaacccggatggagccgacgactgcgaaggactgcttgaagtgggcgagggcgattccggaggcggaagtgaaggaggtaatcccacgcttccccgcacccttgccgaaccttccgccctctcttccatcaccctgcgctacaagcatcccctcgaatggaccgcctcctgcaatcccgaaaccggacagatctccgtcaaacgacccacgggcagttccatctccttccagagttctgacggccatgccggagcctccgtctcaggaagttcgcgcaagttgaactacaaggttcggaagctgaatgccgacaagtctccctgcaccggcggctctcccgcctatctggacatggtccagagcaatgggcgcaccctgcgcttctcggcagccaccggaaaggtcgtctccctggtctccgcctccggcgtggaaaccacggcggaagattattcccggcagatgaaggtgaaccgccatccttccacgggagccattcaaagcatctggtccaagtcccggggactgctccaggcggttggggaaggcaacaggctcactctgaaatggtacgctcccggccaggtgagcaagaatgcgcgcggctttgccggcaccggaactccctacaagacggtcagctatgaactgagttgcgaccagggcgtgcaggtgatggacatcgccgaacagagggaggggatgcctgtcttccggacgcagcgaaggacggaaggcaacaaggtgacgaccatccagggagagggagacgagcgcatcgtgcgcacggtggagaaaaacgtgctgcccggttccaagtgggagcgcattgaaactattcagggcatcaacgaggaaacaccttcttcctgcacgcgtacagtcaagaagtacaccgagggaggctggctgaccatcagcagcacccagggctacaagacccctctggcccagactacgctttacacctacaacgaccagttccgggtgtccctggagatcaagcccgatggagggtacacgcgctacgagtacgatgaccagggcagaaccgtgctttccgctgctccctggaccggaggcggggaacggggtacccgaaccacttacgccgacctgcgcttcaatgacttcaggcccgccacggaaaccgaggtgatcattgccgagaatggagaagaaacccagcttctcaagcgcacctacacgtatgaagacagcccgcaggtcagccgcaccacggtgaaggaaacggcgttggggtcggaaaacacacatatcagtatctctgaaacctacggcgaggcggcggagtatccctacgcccggggcaggcggaagatgagccagggcgtcaatggcgtccagacggtctattcctatgaagcagccgcggaatacggggccgtccacaaggtgacggagaccgtgcaggccaacggaaccatcgttcccggacaaagtacccggaacatagagtacatcgctgaaaacggcgccaccaccaggaaagaacaatacgttcacaccgggaaagactggtcgctgattgcctcggaggactacgagtacgacgacgagcaaaggctcatcaagacgaccaagggcaacgggcgcaccagcacgacggaatggatgtgctgcggcccgttgagggaaaccgacgaagacggcattaccaccagctacggctacaactcggccaaacagctggtggaaaccatccgctcggtgacagaaaccacgccagaaacgattacctcctacacaagggatgcggcgggaagaaaggtttcgacacgccgcgacataggagccatgaccacggtagaagggacgcagtacgacgatctgggacgagtagtttcctctacggatatacttggcagagtgacacgaacggaatacagagaggactaccttacaacaaccatcactactccttcgggagccacactacttaccaagaggtactatgacgggactaccatcttacaaggcggaaccggccagcgagagatggagacccggctggagctgacagaagaatgcatcctgaccaccactttgtccaaaggagccattctctcacgcaatctggaaaacggttttggccaaaccgtctggcaggaacagcccaatacgaaggggggattcgtaacaaccaggaatgcctacaatgagaaaggactgctcgtacacacccaaaaggaagatttggcacccacggtcaccacttacagtgaactggggcaagccataagacgaactgttctattggacactctccatccggaggatacttcaaaaaacaggatatcggaaacctcatcctgcttccgggttcgggaagacggcatctaccaagtgcacacttccactacctacaatgcctacggttgccccctcactcaaaccacggagaatatgatttccaggctcagcgcaattctggaaaacaaatccatcaccacagacgtctacgggcagcagagcatccagtggacggagtataccgctccgactaaacgcacccggttcagccagattccgacttcggatattatagccgaatctgtcatcgcagacggctttatggtaagtcaaacgaatcacaccggcatccatgcctcacagcagcgcttctatatctccacaggcatgattctggaaaaaaccgacggccgcggcaacactactattgaggaaacggatcttgcaggacgtactgtcaagatcacggacgcatccggcaccatgaccaccaccagctaccttccctgctgcaatgccgtggcttccatcaccgacggcctgggaggcactacctgctattcctacgacatccgcggcagaaagatagccgagtatggcacctctatccagccggcctgtttcgcctacgatgaagccgatcgtatggtctcactgactactttcagggtggacgaaggggacatcaccactgatccttccggccgcgccgacggggacactaccacctggctctacgacgaggccacgggaatggaactgaagaaaacctatgccgacggctcctgtgtctccaaaacctacgacggactcaaccgtctggagacattgaccaaggccagagggatcgtcactagctatatctacgctccattgaccggagaacttgtctacatttctcacagcgatcaaaccataccctggctctattcttataaccatctaggtcgagtggtctctatctccgatgcctccggcatcagggaattttcctacgattcctacggccgcatgatccaggacacttcctttggaggtgtggaaagctgcactcaggaagaatacgatgcccaggggcgttccaacggatatcgcctgatgctcggcacacgcaccgtgcagcactcccatcttgactatgaccatcagggtggcattattaggatgaatctggaaggactggagtctccttttacctggcagtatgatcaaaccagcggcttcctccaccatctcacctaccccaacggcatggtccgctgcaatacttaccatcccaggctcaaccttgtaaccgccatcggttacaggaagggcgcggatggcgaattggcagccggccacgaatacgactacgacgcgctgatgcgtcccactcaacgccgggactcatgggatgctgccactcctgcgacgataagagattttacctataacaaacgcagtgaactggtcaaagttcaaatccggcagggtgggagcttcaactatcggtacgataacatcggcaaccgcaagactgttcgggaactggaagaggaagtctattatgcggccaatagcctcaatcagtacatggacatgaccgtgaatgaagtttcattcactcccacttacgatgcagatggcaaccagacccgcatcaggacctcgacaggtatctgggaaatcagttacgacgccaacgaccgccccgtcgtcttcaccagccaggatggccgaacggccatcacttgcggctacgactaccagggaaggcgcttcgagaagaaagtcaccgtcaatggaacagtatccggccattgctggtacttgtaccgaggctatttgcaggtagccgagctggatttgatgcatcctgaacctttgctggtaaaaagctatttgtgggatccgacggaaccgaccgctacacgcgttctgatgttgactaattggaaaaacggtggaacgaccattgatcagcatctttgcttcatgcacgatgcattgaaaaatgtcacttctatctttgatgattaccaaacgcgaagagctcgctatgagtatgcaccctttggcagacttattgcggcagagagaaacatggctcaggaaagtaggttccgcttttcttgcgagtacatggatgacgaactgggactcgtttactacaattaccgccacctcaatcccacagacggaagatggatcaacagggatcccattcaggaacaaggaggttggaatttgtatgcatttattaggaatagaattaacatagaagtggatttattaggtaaaatacccccctacaatggaggtgcttctggaatcgttgaagttcctatttttcctcctgcaccaacacctcctgcaccaacacctccgcaagaaggatgttcaatccaaatttgttgcaggcctgtagcggtctttagcagagcccattgcgtgatcaggtttgtctcttcgtcaggcccctccagaggatgtagaggaggtcctacaggaagaggaaaaagtagcggtgctggtggtagtagcggtagtagcggtagtggtgacggaaatggacaaagctctcattgtaagggatgttgtggctcatgggggaatgtcattggaggatgtggttcgatttcaaatggaacggatcctctcagcgtaggtatcactgaagatcttaatgatgccgaaagcaatcctgatcgttgtgagactgtagctatcgtgagtgaaagaatgtgttcaatagcctatagttgtatccaaaaagaaatggaaaaaataaatcaagaatgttatatctataagcctttaggcaataacagcaatacaacatggaaaactgcttataggaattgtattggcggtgattatgatcctccagaatctcaaccaggaaatgatgaattcgacgaaaatgaaaaatgtaagaaataagattctaattattttattaattttaattcctttttctttaatgaatttatttggaaaagagcaattggaagtaaccataaaaaatcaagacgagatacctgtaaaggctttcatctctcttgagagagataattcgttttttcaaaaaattattaatcctgttggttctttttatcataataaaagcactatctatacggaagatatcaagggaaagggaaaattgaaaaatattcgaaatggtgaccgattggtattatttacgaataggagtatattgccgattcagttgcaattaaaagggaaggatatttatcaatttacgttgaattccaccgacttgcctccgttgccagaagaaaatggaatgaaacgtgatccgaattgtgttcttttcacttttgaaattcaagatatgtcaattaaattgctccatattgaatacgcttggtcagcagaagggaatcaacgatgtaaagctatggaattgacaaaatgataggtatggttcgtcctgaaaaagcgttacagggttagacgtaagattttaatattttcaaaccctccggaaagttgcattttccggagggtttgcttttgctgatttatagcagatagctttgctgggttgtatagccgtttcggtgtttttgaggaatctatatacttgactaatgagactattttacatctttttattatttgaaggtgaacaattttttaatgatatactttgaaatttatatcattaaattttaataataattcacagtttctttccattttttatttattggatttaatgaaaagagagatgctcggtttggacgaatcagatgactatttaaggatgattagtcgagtatgtaggtttcaaatattcctgtcgttgttttggatattcttcaaatgccgcaccagtttaaaagccaggcttggcgattgttacaatagctgtggtggaccgatcgaaagtcaaaccaggcagagaggaaacttttgatattaatgcgacaatatcagaaattttgtatgccacccttggtcattctttttcataaggcgctagctccaactggcccaacgtgtcggggcgccctttcagggccatgcgtttgaggtgtttggcgaaggcgggacgacggtggtactttcccacaacctctcccgtcgtttttaggcgtagaaggtacttgtatgtggtgacgcggatggcgtccggtttggcggcagcgcaggggacggcccctatttcccggcagatttgtttccaccgcgggccgtgggtacgctctccgtggcgcgtccaggccagggcgtgggctatctcatgcaggatggtgtcacggatttcatggggggcttccagattggcgcggacaaagtggacggagagggagatgcttttttccagcaggcggcatacgcccagcctcctgcgggcgcggtcccagccgaatttccagtccgggaggcccagttcatccattttcagccgggcataaatttcaatgtcccggaagctgtcgcggttgccggattggaggttcccgatggtcatgctgcggggagagcatagcacggaacgcggggaaggaaatacggagaagatcatcatgacggagttgccgcgggggggcgtcttttttatggaacagccgtttttctttgcaggatcgcggaaaaagaaagcatgcggaaaggttgaagggaaggtctccgtaatagggaatatcactatgagttcagcttccggtaccaagccgcagaggattgcggccattgacgccttgcgagggtttgacatgttttttctgaccggaggcttggcgctggtcgtggccggcatcaatcttttttatgaccagagccccgcatggctggtgaagcacagcgcgcacgtgaactgggaggggtttgcggcctgggacctggtgatgccccttttcctgttcattgtggggacagccatgccgttttccttttccaggcgcatcggcacggaacccatgtggaagatttacctgaaggtggccaagcgggtggtggtgctttttttgctggggatggtggtgcaggggaacctgctgagttttgaaccgtccaagatgtccctgtactgcaatacgctccaggccatcgcctccggctacttgattgcggccatttgccttcttcatctgtccatccggtggcaggtagtggtaacagggctgttgctggttgtgtactggctggtcatgaagttcattcctttttccgaccccgtagtgggttcatgcccggccggcatgctggagccgggaaggaacctggccctgctgctggacaagtacctgatgggagactggcaggatggaacgaattacgcgtggattctggcccagttcggctttggggccatgaccatgctcgggctgctgggcggccagattctgaaacgggtgcaggggcacggaaagaagctggcgtggctgcttggcgcaggtgcgggctgcctgattctgggatatgtctggagcctggattttcctatcatcaagcatttgttcaccagctccatggtattgtgggcggcgggatggtgctatttcctgctggccctgttctacctgctgacggatgtgctgaaactgaactggctgacgttctttttctccgtgatcgggagcaatgccattttcgtgtacatgtgggcggagctgtgcccccccacgcgcaatttctcccgggtgctgtttaccgggttcagcgagtgtttcggggatgcgaaccggtttgtcttttatttgtgcaattacgccctgatttggggcgtgctgtattacatgtacaaaaaccggaccttcatcaaggtctaggcttgttttcagccctccgttcatagtagggtcttccgcgtgcgggcggcgctgccgcgtggagcgttttccgcgtggaccggcatgcctgcgccgggcgttcgtcatgagccggtcctttctggagccatggagattcctttcaaccaacctcacaaacacggtcccgaactggattatatccgggacgccatccagcgtgcccatttatgcggggacggctattatacgaagaaatgccatgagctgcttatggagcgcaccggggccggaaaggccctgctagtccattccggaaccgcggctttggaaatggcggccctgctgatcgattgccgcccgggggacgagattatcatgccttcctatacgttcgtctccacggcgaacgcgtttgttctgcgcggcggcgttccggtgttcgtggacatcaggccggatacgcagaatattgacgagacgctgattgaagcggccatcacggaccgcacccgcgccatctgcgtagttcattatgcgggcgtggcgtgcgagatggatgcgattatggagattgcccggcggcaccatttgtacgtgattgaagacgccgcccagggcgtaggctcctgttacagggggcgccgactcggttccatcggccatttggggtgctacagcttccatgagaccaagaatgttatttcaggtgaaggcggcgccctgctggtgaatgacccggaactgatggagcgcgcggagattatccgggaaaaagggaccaaccgggccaagtttttccgcgggcaggtggacaagtacacctgggtggacgtaggctcttcctatcttcccggggaaatgactgccgcctatttgtacgcccagcttgaacacgggcaggagatcaacggggaaagactgaagtggtggaatatgtaccaccgcgcgctggaacccctggaaaaacagggcgtcctgcggcgtccgtgcgttccggaacactgcgcgcacaacgcgcacatgtattacatcctgctcaattctctggaggagcgcaccagcctgattggcaaactggcggaatgcggaatcaaggccgtgttccattacatccccctgcattcctcccccgccggggtgaggtttgggcgttgtgccggccccatgccgcatacggaccgcaccagtgaaacgctgctgaggcttcccctgtattatgacctgggggaagaaggctgccgggaagtgctgcgggccgggttcggcctggaagagtttgaagaatgatgaagattcacctggtcaacgtgtccgatgtggacgagtccatgcgcatgcagctccgcatgtggcgcaattccgacgcggtcagccccttttttctgctggaccaggtgacggaggaccagcaccgggcgtggctggaaaggaatatccgcggggaggacgcccttgcctgcgtgatttacgcggaccgggtgccgctggggctggtgtacctgccgtggtttgaccggaagacgcgccgcggcgagataggcatttatctttacgacaggggattcagagagctgcgtccggcctccgccgcgtatgccgggatgatggaactggctgcaacagagctggagctggaacggctgtacgcccggattctggagaataacgccgcttccatccgttttcatgaacgcatgggattttcccatgccccggaagaggacggggagtgcgagaagaacggggaaagaaagcgcgttctgatgtatgtaaaaacgttatgactgatccacaggttcaactgtccattgtggctaccgtgtactgcacgggtggctatctggcggagttctgttcccgcagttttgccgtcgcgcttgaggcgggttatgacccctcccgcacggaggtggtgctggtgaatgacggctgccccaggggagggctggaacaggccctgaaggaacgggaaaaggacagccgggtgcgcgtggtggatttgtcccgcaatttcggccaccatctggccatgtacgtggcctgcgaggaagcccgcggagcgcgcgtgttcctgattgacagtgatctggaggaagcccccgaatggctggcggatttttcccgggagatggcctccacgggggcggacgtggtgtacggcgtgcaggagaagagaaagggcggcctgtttgaagccgtttccggagagttgttttacacgctgtttaacctgctttccgaccagcagattaccaggaacatggtcacggcgcggctgatgagcgcgcgtttcctgcgggagatgttgaaattccaggaccgggagccctttttcttcggcctgtgcgtttccgccggcttccggcaggtgccgtgcacggtgaagaaggcgtcctcttcccccaccacctacaccttccgcaagaagatggcgctggcgatgaattccgtggtttcctacagcgccaggccgctggtgtacatttcctacttcggactgggggtcaccctgattgccatgctgtacgtcatctgggtggttgtgcgccagcttttgtacaatgtggcgcctcccggctgggcctcctccgtggcctccatctggctggtcggcggtctgattctgatgagcctgggggtcatcggcatttacatttccaagatttacaaggagaccaagcacaggcccgccgtagtggtggcgcgccggtatgagtgagttcctccgctcttttttctctcatgatcaactaccttattctgcacctgctgttcatcgtttacgccctgaataccgttctggggcggatggcggctccctatagctggacggactggcaccggttcgccctgctggccggcgtgctgttcctgctgggcatttatgcggcagggtggcaggtgatgctgaaaaagttcaatctgggcgtggcttatgccaaccgttccgccgtggtcatctggggaatcctgctggcgtggctctgcctgggggagaccctttcctggacgctggcggcaggggcggtgctgattatcagcggcattattcttgtttccacggaggaggacgcgcatgaatgaggaattctacatcggactgaacctgttttccgttttcctggcctcctgcacgcaggtgattctgaaaaagtccgccatgaacgaacggctgtccggcctttcctatttcgtgaatccggccaccgtgacggcgtattccattttcctgggctgctgcctgctcacgttttactgcctgtcccatttgccgatgattacagtgaatgtgctggaatgctccgcatacgtgtacattcttttcttcgaccggatttttttcggcaagcccattaccatgcgcaaggtgggcggcaacctgatgattattgcgggcattatcatctgcctgaaccgctgaggcggcgcccatggccttttggtccttccgggctttgcgccgggataggctcttgactttcattttctccgtttctagtatgcgggcccgggcagggagaacagcccgcaaagtcagggaatttgcttatgttgaaacaggtttggagatgggtatcgctttttccgctgctccatcccgtatggttcaacctgctgttgctggttttggcctggagcattgtgggcgtggcgtaccaatccaatgacgatctggtgattgcgtccgtgcttgacggctggggcgacccctcctacgcggacgctcacgtcatttttgtcaatcccctgctgaccgggctgctgctgaaagcggctcccgttctgggcggcctgtccgtctggcccgtgttcctggcgcttgccacgctgtccagcggagcggccattttcacgatgctgacggcgcacgcccgcaaggcgcgcagatatgatttcaatacgctggtcctgctgctggtgtggcttttaatcatgccgggcttttatgccgccctgcaattcagccatgccgccttcctgacggggttcaccggagtgctggtatgcctgaagtacggttcctcctcctggaagggactgtgcacggggggattcctgtgcgtgctgggcagcatgatccggctggacgccgccctggtgtgcgatgctttctggggggccatcctgctggctggcagtttggacgggtttaaaccgtcccgggaaaagatgcgtgcccgcggccgtctctggctggccctggccggcgtactggcagtctccttcggtctgaatgagtataacaagcacgcccaccggaatgtgctggagggctgtgacgtggcggcgtggaaccaggcccgcgccctcctttcggacacatgccccatcaggccggagggcgcctaccagtgcgaggagtacggcgtgttcgccaacgatatcaagatggtccggatgttcaccaattgcgatatggacgctttcaacacggattatctggaaaggcttctgctggcgcgggacgggggcgagttctggcccagggcctgggtccgcggggagaaggcccttcatctgttttcctgggattccgtcatggaccttctgccgtgctggattttattcggcctggcctgccgcgtgtctttccggcggggggattccccggctctggtgttctgcgtgggcgccctgctggtgctgattctgctgtacatgtccagcatagaccgcctgtatttccgcgtggtgtatcccacgttcctgattgccgggctgtgtctgctgtggtcggataaataccgccccattcgtttcaaatggaccggaaagggcgccctgacaggcggcgtgcccatgttctgcgcgttcgccgtttctttgtcacaggcgtgcgccgccgtgtgggaggccaatctggagtctttttccccggatgccggccgcctgctgtgcgaacgggtggaccgtgaaccggattccctgttctgcgtccagatgtccggcggcaccattgacgacctggctccgggacagtccgttttccgcaaggcatggagctgttcccggaagaatgtcgtgacgctgggcggctggaattttccgttgaagcccgtgcagcggaagctgaaggagatgggttgggaggggcagtcctccctgaacctgtgcagggataacgtatatattgtctgcctgactccgcagggggacgtttccgacatggacagcaagttcatggggatgctcagccgccatatatgggagcggcacggcgtacgcacggcctggcatctggatgagaatattgagggcgtgcgcatttaccgcctgcgcaagacatggttccagcccgggaagcaggaactgcctccgtcccggtgatgcgccgcgccggaaagtaaaatcccccgatgcacgctgcgcaccgggggatgaaagggaaattggagctgtcgacggttgttaaaagcgcgggccgccgccgggcatgcgcctgtttgtgcgctcttcacggagttttgcctgttccgccggggtaagaagcaggaattccaggtcgcggatggcgcgctgtttttcagcgggatccttgatgccggaaatcaggcttttcattttttcaagggcggccatctggtcgccgagctcaaagcatgccttttcccgttcccactgccttttgaccaggaagctggctttttccacttccgccgtttttttgtcgctggcggaattattttgcagcagggtcgcttccagtccgatgcgtttgttccagagtttccggaagttttccacatcctttttttccttgtagggagccagcagcacgcggtcgaagatggtgttgaggtccatcaggttgtccggcagggtatccgaacggtagtcgctgatgttcaggtaggagcggattacttcactggctccgcccaccatggggagctgttcgcccacatccttggcgttggcggccacttcatccagcatggacaagacgctggaggaaacgttgagttcgcgctcgttcttctcggcatccgcctttctcaggcacagcagcatccatttgcactggatttgaagggcttttttgaagcctggggccacgttgttccccgtattctgcttgcgccagttggaaaaggcggtgctggggctgtccggcttgctgctgttgccgttgctgcctcctcttcctccggagcccggcatgcgcatcatccggaatcctccccctccgccccggttcagcatgcgggacatcatgctggtcgggttcagaaagcggtctttcatggcgtctacataaagtttcatggcggcgttttccgtgctggtggccgcggtgagggcggtcacagccttctggatacgggcggagctggtgttcaggtagccggatttgacttccttaagccactcggtggcttccttccttgcggaatcggtaagcatttcctgagcctggcagaaaccggagcccaggatgagaagcatcagcgcggaaagcgccggacgtttgcggagcggggtgaagtgtatcatgacggtatgaggttacagggtatttttacaaacccctcccctgaagaaaagttgcagcttttcttcaaaaaaagaacagcacatattgttacggaggaaaaatgtttaccccagcaccttgcggacgcaggcggagcagacggctacggcctcctccatttcctccggggaaatgatgaggggcgggttgaagtacaggacgtctcccagcggccgaagcagcaggccctgtttaagcgcttccttgtaaatctggtatcccagccgccgttcggacgggaagctcttcttggtttccctgtcctccaccagttcaatggcgttcaccaggcccaggctgcggatttcccccacgtgcggatggttccccagcgcatcggcgatcatccggtggaagaggggggccttttcctgcgcccgggaaataatttgttcctcgtccagaatcttcagcaccgccagggcggcggaacaacccagggggttgccggagtaggtatggctgtgcatgaaggcctttccttcccggtagtccgcataaaaggcatcgtaaatcttctgcgtggtgatggtgatggacatgggcatgtagccgcccgtgagccccttggagacgcacatgatatccggggagatgccggcctggtcgcaggcgaacatgctgcccgtgcggccgaagccggtggcgatttcatccgcaatgaggtgcacgttataggcgtcgcacagggcgcgcagcttcgccaggtaggcggggggatacatccgcatgcctgcggaaccctggagcaggggttccaccagcagggcggcgcattcatccccatggcgtgcaaaggcctcctgcgccgcgtcaatgcattccgcctggcagcaaccgcgtttttttcccctggggcagcggtagcagtccggagcgggtatacgcacgatgtccagcagcaggggcttgtagagttccgagtaaaggtccaggccgcctgcggagagggctcccagggtttctccgtgatagccgtcactcagggacatgaagcgcactttctggcggtttccggtctggtagtggtactggaaactcattttcatggcggattcgatggacgccgaaccgttgtcggaaaaattgaacttgcagagtccctgcgggatttttttcatcagctcctcgcacagggtgatggccggcttgtgcgagaagttggcgaagatgacgtgctccagggaatcaagctggttcttgatggcctggttgattttagggtgggagtgcccgagcaggttgcaccaccaggagctgaccacgtccagatagcgcttcccgtccacgtcgtacaggtggattccctgcccgcgttcgatcacgatggggggcagcgtttcatagtctttcatctgggaacagggatgccagatgtattccagatctttttttgaccagtcggagtgattcatggggaaaggagcgggaaaacgggacagcccttatttcatgcggacttcatagcccagctccgccagcatggccaagtcttcccggatggtgacgccggaggtggtgagcatgtccccggagatggcggcattcgccccggacatgaagattttcctgccgtggtccttcatggtgttccttccggcggcgatgcggacgaagccatccggcatgatgaagcgcaccagcgccacgatgcggagctggtcttcctccccaagcggggtcatgtccgcgtacggcgtaccggggatgggcgtcaggaagttgatgggcgcggacttgatgcccagtgcggcgatgtccatgtacatatctatccggtcctccagggtttcccccagccccatgatgccgccgctgcacacttccagcccggcttccatggcccacttgatggtttgcagcttgtcgtcgtacgtgtgcgtggtgcagacgttcgggaagttgcggcgggaggtttccaggttgttgtggtaacgggagacgcccgcggccttcaattgttcgcagtgctttttggagatgaggccgtgggaggcgcagagggagatgccgcagcgttcggcgatgtgcctgtagctggcgcagagccggtccacgtccgcatccgtcagcctcttgccggaggtgacgatggaatagcgcaggatgccccgttcgtcattgtacctggcgcccgccagcagggcttcatcacttaagagggggtattcctccaccgcggtggagtaatgggcggactgggcgcagtacttgcagttttccgaacatttgccgctgcgcccgttgatgatggtgcagaggtcgaagacgtttccgcagaagtgctcccggatggcgttggccgcctggcacagctcctccagcggttcccggctgagggctatcagttcttctctggtgcaggaaccgccctggagcaccctggagaggagggaagaggtcagactcatgcgtcaaagactacccccggcgcggttcacgtcaagggcagaatgccgggggttacgtatcgtggggaatccttccctttttccttatttggccggctgttccggggcctcgtagcgcagggcctggaatccgggcgcgggcttgtattccctgtccaggatggcgatggccctgtcaataaggtcacggttttccgcggcgatgtcgtttttctccgcagggtcttttacgatgtcgcacacttcccggttgccgggttttttgccagggaacaggttgaggcggatgactttctttgcgtcaaagcgcacggccacctggccgccgtagccgcctcccgcccaaaccatgggtttcctgtctttcaggacggattttttacccagcaggacggaagagatgtctgttccgaggggagagcccgcatccgctcccgccagggcgcactgcgtgggcatcacgtctgcatggaaggccggctgggaaatggttttccccggagcgatttttccgggccagcggatgattccgggtacgcggatgcctccttcatagagctggcctttcaagcctttcaggttggctacggaatggaagaaacggtgatccaccccgcctgcgtcgtgcgtggtgccgttgtcgctggtgaagatgacgatggtatctctttccagtccgcaggatttcagcgtgtccagcaggcgccccacattgtggtccatctgggaaatcatgccggcataggcggcgcggggacggggatggggcaggtacccatgggcgccgcggtaggggcgtttgtcccattcacggggatagtggtcaatccattcctggaggggctgcatggctacgtggggttccagcggggcatagtacaggaaaaaaggtttcttttcacgggccttttccttcacgaattccagcatcctgtccacgatgaagtcggaactgtgctgttccgcgcggtaggtctccgccagcacctcccccttcggttgggagccgtgcccgatggtggcggcagtcagggaggtgttcagaacttccttcttgccgtcattccatagatatggaggatagtaggtatggcacgctttctgatccgtgtagctgtagaacctgtctacgccgtgcctgtcgggcgtgccagtggagccgaaatccccaatgccccatttgccgaaaaccgccgtggcgtaatctgcctttttcatggcttccggcagggtgtaggtttccgttctgatgggccagtcccttttgaggttgcgccagttttcgcttgcgtccacgcgcttcaggtcccgcacgtcgcaattgcccgtatgcctgcccgtcatcagtacgttgcgggagggggagcaaaccggggccccggaatagaaataaacccaccgctgctcttcggaggtcagcctgtcaatgttcgtttttttaattttttctgtccgtagcagccacttctgcccagtccaggtcctccgcattgatgagaaccacattggaccgtgccgtttccgccacaggcagtatcaacagggaaagggcggtggagagaataatgttgtaaaatgtgaccatacgataataataacgaagaaacactcttccttgtttcaaaaaatagttccgctttccttgatagatgccggatgagatgttcacattgtgaacctgccagttttcctttatttaggattatttatttgtgctgttcctatttgtccggttcctctttatttatatttttatatggaatggtgaatcataaatatttgtaatagcaatttatttgtcggatagatcataaaccggctacaaggctatcatataatcccggctaggttttttgatgcatttctcaagatgcttaaccggaaattcagaatgtaaatagtcctgagtggatcattttttaatgaaatgatacttccttgaggatgaggttggatttacagtctgttacggactgtaaacgaaaaaagcccgcttgttctcagggaaagtgctgctctttacggctattgagacgtgactctgcgtcaacgtgtaacgggctccatgaaagaggatttgccacaattctacttcaggcccagatatcgtagaaattttccgtgttctcgtcaaaaactaatgagcccagacagatttctattccacgtaaaagcccctgatatgtaaaggaacgacattgcaagttctttcctcttagagttacagcttgactccggattggaaatccgctaaaaaaaatgttccggtgcattgatttaattcccgggttgaaggagaacgatagatgctggttaaaaaaattctgtggagaaatccgttcgttaatttgcagggattcgctttgggtatgtatggggttctaatgttagatttttattataaatgaattttaaaaaaataggaaaaattcccttgtggtgggggataataatttgggcagtatttgtactgcttttttttgctcctgctgtgttcggaggaaaggttttagccccggtggattgtgtggaatgtctgttcaaaccattcgcaactcagccaatggaggaggtccataatcaatataacgtagatggagcttctcaatatttaccttatagctgggcaatgcagcagtcctggcaaagtgatgggtatatgggatggaacccttatacccacaatggaacttcactgccggaaaataccatgttaagcccgggggattggcatcattggttatttggttttcttcctttctggacggcatgggatgtgggaatatggatgcagttttttatcgcgggactggggatgatcattctactgaaatcgaggggaattcctgttccgtatgcattgctgggggccgtgagtttcagtttttattcccagtttattatgtggatatatgaccggtggcttggtggaatgatttgggcgccgttgattgtctgggccctgttggaagggagaaggaaaaacaaattggtgcatattccctctattctctttatcgctcttggattcagaggaggccatctgcaagcgtgtctctttgtttttcttttggtgttgtgtgtatttcttgcggattggtggaaacgaacaaatcactggtcttggaaagttttgttgaaatcatcttctttttattttatctccggatttttggcggcgttgctttccttggacgtttttgtggacaccttgccgcgtatggaaggctgtaaaagcttgccgtttgtctgggggctggaaaatcttccttttctggtcacatctgtgatgccgacgctcttcggcattcctcagacaatcagtatttccaaagttatcggcgctgatttattcgatatcaagtttggaggaggagtagttttcgtgttggctgttctggcattgtttaaccgccaagcaccgttgactgccaagttttgttttcttgtcagtttaattgtttcatgcactcctctttccacttttttctattcacgttccacggttgtgatggcttttggaatgagctggcttgctggatggcagttatttgaccttaggcagcatccggctcttcctatctggcgcagacttgcatggtggggaattggatttttgtgcgtatggcttgctgtatcggtggcagttcaatggtttcatgaaccattgctgttaaaattgcatagctttattgacggaaacataacgacttttcagcaaaaataccgtcattcctggtatttgctcaggagcgagcatctcctgaaccagttgatgatttgggattggcgcaatgtctcattaattttactggtcggcatagggggctgggcctgttcccgcctgaatatatccagccgttatccgaagtggtgggcaggactcgtggtgttatgtacttttggggagcaaatagtgttttcttcttcatggattacctattccgacaaaccggaaagcggttatctttatagagagccggaatggatgtccgagtttcgcggacatgtgggggatggagccgttgtcatagtcaatcctcataatgacttggattttctatgtaccaatcatttatccacatatggaataagactggcctcaggttatgaaacggtacagcccaaatatctgagacctttgtcggatggacattatcatcggaaagattatgccatggccggcatttcccatttgttgtgtgatgccagagccggaaagccatcccttgatggatggaatctggttcaggaaacagaagatttcttcttgctggagaatcccttgtaccgtggacgctattttgtccgaacccaagaggaaggaaatcatttttctcctgttgttccggattggagaacaaataacaagatccatgttaccgtgccgccaggaacaaaggaattgtctgttcttgagagctattccaagggatggagcgcccggagcgggaagggagaagagcttcctttatctagtactgagcgttattctattcttgtttttgttccggattcggaacagcagacagaaattctccttcagtaccatacgccttatcgtggatggtattatagcattatggggggaattgctctgtttctgcttgttacagctttcttgcagcggcgcattaatatcaagacgggaaagatgggataggggtgccttctctccgcttttttgtttgcatgaaataagagcggtcagggcaggatgatgctttctaccgctgtacgtatggtttcatcactgaattggtccagcgcatgtttcagaaagccctgggcgatcatcctgcgcgccgtgtgctccggaatgccgcgtgaaagcaggtagaagatttcttccggagagatggaggaggtggcggaaccgtgcgagcactgcaccctgtccgccaggatttccaggccgggaatggagtttgcttccgcccgggggctgaggatgaggttgcggttgctctggtaggcgctggtatcgtgagcgccttccgccaccaggatcatgccgctgaaaatgctgctggcctcgtcatccagcacattgacgtaaagcaggttgctggaggctccgcggtagaggtgcttctggtaggttctctggtccagctccttgttttccttcaggtggctggcggaaagcaggcgtacgttggcgctgtctccgttcaggaggcagaccgtctcctgcctggcccatgccgcgccgggatggctgacgaggtgctccatttccgcggaatcgtccgccatgatgtggcagagctccacggcccgggaacggctgttgagctcctggaccagggcgtatttgacggaggaagcggaggaaagatggtgctgctggagcgctccgcagaattggctgccgtggtccgcgctgacgtggcgttccaggatgtgcaggcggcttccggtctccgcaatgaccagcgtggcggggaagacggccacgttgtccccggagatgaagtggaagatttccagggggcgggagatttcccggtccgccatgatgaccagaccgttgtgctggagagccgtgttcagcgcggccagtttttcggaaccgagcatttccggcgctgtttccaggtgtttccgggcggcgtccgggtattggagcacaaagtcttccagatccatcacggcgaggccttccggcagttcttccgggatggagacggggaggccgttggcgtaaacgatgcggatggcgtccggcatggaggcatgctccctgatgatggaggccagggcttccggtgccacgggaggagcggcttcaaagttttccagggattcgttgccgggagttccgaaacgccaggattccatgcggcgggagggttccggaagctggcccgcctgttccagggcctggcggtgcctggcttcaaaccatgcgggaaggaagcctgcggggaattgttcttcgttgagcaagtggttcatcatttccctccttatccgatgctgtcttccatttccaggtcaatgagcctgcgcagttccacggaatattccatggggaattcctgaacgaggtcgttaatgaatccgttgacggccagggacatggccgccgccttcgggatgccccgctgctgcatgtaaaagagcatttcttcagagacctgggagacggaagcttcatgctgcaccgtgttcctgtcccccttcaccgtaatggcggggtaggtgtccgtgcggctgttggccgccagcaggagggcgtcgcattccgtgttgttcttgcagcccttgaggcctttgcccatgaccacctggccccggtagctggcgcgcccttcaccgatgctgatggatttggaaacgatgttggacgtggtgtcgtccgccgcgtggatcattttggcacccgtgtcctggtgctggcccgtattcgccagggcgatggagatgacttccccgcgtgcacgcctgcccttgagcaccacagccgggtatttcatggtgagtccggagcctatgttgcagtctatccagcggatttccgcgtcttccatggccagtccgcgcttggtgaccatgttgaagacgttggaggaccagttctgcacagtgacgtactggattttcgctcctttgagggccaccagctccacgacggcggagtggagggtggtggtttcaaactggggggccgtgcacccttccatgtacatgagctccgccccttcatccgcaatgatgagggtgcgttcaaactgcccgaagttttccgaattgatgcggaagtacgcctggagcgggtgcttgagcttcacgcccttgggcacgtaaatgaaggaaccgccggaaaataccgcgctgttcagggcggagaatttgttgtctcccgtggggatgactttgccgaaccaggggcggaagacgtcttcatggtatttcaggccttccgtggagttgacgaagatgacgccctggctgcggagttcctccttcatgttggagtaggcggactcggagtcatactgggcttccacgcccgccaggaactggcgttcctgttcagggacgcccaggcgttcaaaggtgcgctttacgtcttccggcacgtcgtcccagcttcgcttgggccgttcgccatcggaaagatagtagcggatctgggagaagtctattttttcaatgtccggggacgcccagtgggtgggcatgggcttgcttccaaagacggcaagcgcatttttgcggaactggcgcacccattccggatcgtccttgacgtcgcagatgtagtcgattgtggcctccgtcaggccgtagccggcgttgaatttatggcgttccgggaaggagaagttccccttgctccggtcgaagtcaaacaggttctgtttgttcccgtcctctgacatgtcaggtgtgtcgctcatgattgactgccggattggcggcgttacgccttttccgctccttccgcctctttcaggaattcatatcccctgctttccagttcgtccaccagctctccgccgccggtacggacaatccgtccgtcggccagcacgtggaccacgtccggcttgatgtaatccagcaggcgcttgtagtgggtgatgacgaggaagctgcggaagggggagcgcatggagttgactccttccgaaacgatgcggagggcgtctatgtccaggccggagtccgtttcgtccagaatggcgtaaaggggatccagaagaagcatctgcagcacttcattgcgcttcttttcaccgccggaaaagccttcgttgacggcgcgggaggtgaatttgcgggacatgccgagctggtccatttttgcatacagcgtcttgtagaaggtaaccgcatccagttcctccccctggggcatgcgggcctgcatggcggcgcgcaggaagttggcgttggacacgccgggaacttccatgggatactggaacgccaggaagaggcccgcgcggctgcgctcgtcaatgctcatgtccagcaggttctgtccgtccagccagacctccccttccgtcacctcatagtccgggtggccgcagaggactttggagagggtgctttttccggaaccgttgggtcccatgatcgcatgcacttctcccttgggaatttcaagattgatgcctttaagtatttccgtgccttgcactttggcgtgcaaatttttaatgaccagactcatgatgatgaaagggatttagccctgcggcgtgatgatggagcccctgagggtgatctgggcttcttctatgcacacgtcgtcgggcaggttgatgaattccttcagatccacgccctccttgatggtgatgtcgtaaatgcagccggtccgggtgtcctggaagtgcccatgatcaacgagattgggacagaagcgggaagagctgcgttcaaagttgacctgattgaccaggccgtgattcaccagggcttccaggcagttgtaaacggtggccagggagatgctggggagctttttgcgcacccgctggtaaacttcattcgcggtgggatggtctctctgttccaggagaacctggtagacttcctgtcgctgcttggtgagtctcaaaccggaaataaccgggagggtagaggcggtgcgggcggcttgtttggaatctgttttgggattcatatcttatttttcatgctctgcgtggatagtgggggagggtcaattgttttgcaagaacaattcctgttatttattcgggcgcggggaggggtaaaaaaggggcggtcatccctgtggatggccgcccctgcagggagatagagttatctgtaatttagttggcagcctcggagctttccggggccacattgacgcggcggccttcgcggtcaaagaacacgcggccgtccacgagggagaaaatggtgtagtcacggcccatgcccacgcccttgccggggtgccacttggtgccgcgctggcggatgatgatgttgcccgcgatcacttcctgcccgccgaattttttaacgccgaggcgcttgctgcgggagtcgcgaccgttcttgacagaaccttgacctttcttgtgagccataagattaggataaaattaagggttgaaattaggcgttgataccggtgatttccagcttcgtcatggcgcggcgggaaccttttttcttgtggaagcccttgcggcgcttgaatttgaaggcgatgatcttcttgtcgcggaactggctgacgaccttggcggagaccgtagctcctgccaccgtcggggtgccgagggtcacgtttccgtcattttccaccataagcacctgatcgaagcttgcttcagcaccctcttcaagggtattgatgcactcaacgtcgatcacgtcgcccgcctgaacgcggtactgcttgccacctgttttgaaaattgcgtatgccattgctatcactgttaaggttcacccgcggatgcgggagccgcaataaaccatatcaccttcttttagacaagcaaaatttcatgaaaaaatgagcgaatggtataaaatttttaaaaacggccccgttttaactcattctccggaggaaatgagggagctgggacggcaaataggtaaaattttaatgcccggtgaagtgttgggcgtagtgggggagctgggcgccggaaagacgcacctgactcaagggattatggaagggctggggagttccgatgcggcggccagcccgacgttttccctggtgcacgagcatgcggacgggcgcctgcgggcgtgccattttgatttttaccggctgaaggatgagtccgaattgctcggcataggctgggacgagtatctggacggggacgcggtgctcattgtggaatgggccaacctgtttccggacgcgctgccggagggaacttcctggctgctgctggagcacgagggggaatgcctgcgccgggtgtctctggcccctgtggaatgaagcggctcagtagctgatgctcctggagaacgccttgtcaaagccggggctgagccagatggtgttatgcatggcgccggggaattcctggtagttgaccggcgtggagaagcagtcccggagccgcttggcgtggtcaggtgggatgacttcgtccgatcctgccgccaggatgctgacggggcaggctactttgggcgctgccaggtccgaccggaagtggtccggcaggagaagcttgacgggaaggtaggggaagaggccgcaggcggtttccagaagactgtcaaagggaaccagcaggaccagctttttcacgttcctgacggaggctatctgcgtggcgactccggagccgaggctttgcccgaccaggatgacgtcgtccggcgttcttccggtttccttcagcacggagtcgagaatcgccagggaatcccccatgatgttctgctccgtgggcgtgccggtgctgagaccgtatccccggtagttgaccaggagcttggcatgggggaaccggtccaggtagggaagcatcatggagatgtccatggcattccctccataatacaccagcaggggctgtcccttcttttcaataagccagccgctgagctgggccccgttatggtggaaagtgcgccggtggggctcccaggcggcgcgtttttccagatacacggttttgtccttgggctggggcggcaggtacaccagggaacggacggaacactggacgcacgccagggccagcgctccggccagcagggcgctcgggattttccattttcccggtttcagcatccgcatgaggttcattgtccagaattttccgtggtcatggtcccggccgtgccggtgcggggtagggctgtcccccgttcctggcagctccagccggtcagggaggacgttttgccttccgcgtccaggcggcacaccccgctgaggagtatttcccgggaggaggtcttaaagtgcaggacggcgggtgatgttccctgccggtacgtcaccgttgccgtttccggaagcgctccgttgactcccagggcgcctctgccgtcacccagggagttgtataagagagtcatgccggagtttgcgcgctggatttcccgtgctggggcaggttccgtttcaccatccaggacaatggccgtgcggctcccgttggggaaccattccgcctggacgttatccgtttcaagcgtggcgccgccgcgcccgcaggcgcaaagcgtcagcagcatgccgggcaggaggaggaaagctggtcgcatggaaagagtgtccccgaatttgaggaggaaggcaatctctcttttctctccatgggcggcttttgcaggaattggattttttctgatagaagaaaaccggggaaaaggtataataaaggatatgtttaaccggatgttttcatggagttttgtggccgcagcgtgcgttgcgggatcattcccggcactatcccaggggcaggaaggcgcggctcaatccgggtccgcagccgtgaaggtgcctgccgccagtctgctgatggcccgccaggaggtgggggaaacgcggttggaccggtctttcaagaatggtgaattgagcatcgggggtaaaaaatacgctgcgggcatcggcactcacgccacatccatgattccgctccccgtgccggagggcatcggctcaagagtgtggaagctggaaggggcctgcggcattgacgacggtacggacggagacggcagcgtggaattccgtgtaatgagcggttccgaagttttatggagttccggcgtgatgaagaggggaatgcctgcgaaaaagttttccgttccggtagcggaaaacggcatacggcatctttacctcatggctgaccgggtggaaaataattcctatgaccacgcagactgggtggacctggtctggaaaacgggcggtgagccgcagggcatgaagggagccgtggtgaatgccgccaaattcggcatggttcccggcgtcaggaaagatcagggtccggccctgcgggccgcgatttccgccctgcggaagcagggagggggcgtgctgaacatccccaggggagtctatcatttttatccggagggagccttgaacatgagcttcaatatctccaaccatgaccagcccctggttcatccggtgtgcgtgaccctgactgatttgcggaatgtccgcgtagagggcaatggctccctgttcctgtttcacggcaaggtggttcccctgctggtcatggacagcgaaaacgtcagcatcaaccgtctgtccgtggattatgaacggtcctattgtacggaagcgcgcgtcttgaatgcggacgacaggtccacggaggtggaaatagacaaaaaagcctacccctatgaaatcaggaacaacaggttcgttttcctgggcgaaggctgggaggaaggaatggggagctgcatggcctttgagaaggggaccgggcacatcattgccaatacatcggacatgggctggaacggccgggtggaacccctcggagggaaccgcctccggctggactggaacctcaagcagaagggaatcaagccgggggatacgctggtgctgcggaattataaccgcccccatccgggatgcgtggtttaccgggcgcggaagacggtcctgaatgatgtggccctgcaccagagcacgggcatggctttgctggtccagcggtcggaggatttccacatgaagggcggcggcgtcatggtcaggaaagggacggggcgcgtgcacaccgccggggcggacgccacccatttttccaacacccggggcgagatcgtggtggagaaagccttgttcgagggaatgatggatgacgccatcaacgttcattccacctgcctgggcgtgacggaggtagtggacggccatacgctgaaatgcaagtacatgcaccgccaggcggtggggtttgaagtgttcctgcccggtgaaaaaatccgttttatcaacgggcctacgcttgaaccgggaagcaccgctaccgtaaaaaccgccgtgaagaagagttctacggaactggtgatcacgctggaagaaccgctgcctccgtccgtcaaggccggggacgccgtggaaaatgcggatttttacccttccgtagtattccgcaacaacatcgtccgcaacaaccgcgcccgcggttctcttttcacgacgcctgagaaggttctggtggagggcaatttgtttgaccattcctccggcgcggccattctgctggccggggacgcccagggctggtatgaaagcggcgcctgccatgaagtggtgatccgcaggaataccttcatcaacaacctgacctcccgctaccagtttacgaacgccatcatttccatttacccggaagtcaagcagttgaacaagcagaaggattattatcaccgcaatgtcctgatagaaaacaatgtgttcaagacgttcgacgtgccgctgctgtttgccatttccacggataaccttaaattcgtcaacaacaaaatcatttacaacaatgatttcaggggctgggggcagaagcccttccagttcaggaggtgcgccaacatcctgattaaaaataacaaggttcagcctccccgcacatggtccattgaggactgcaagctggaaaatactcccgcggaccaggtgcgcatagagaattgacgtttccccgcgccattccgcctttgctgcggaaagccggcttttgcggatttttcatgctgcaggggccggacggccgtccgggaggaaggcggagttttttacggttatttcaacgtcttgacgcagaacggtgtcattaccggaatgatagatattccttcccgtctggtcaaacgctgcaaaaagttcattgagccgtaccgggtgacggacggcaaggggttcaagttatcccactatgatccgggcgatctgggcaagttggacaaggacagcaagaaggaagccgtggacaagctggagaagggcattgagctgctggaacagcttcaggaggtgctttatgccagcgaatcctatgcgctgctggtggtgctgcaggcgatggatagcgcgggcaaggacggcattgtgaagcatgtgatgggcggagtcaatccgcaggggtgcgtggtcagcagcttcaagccgccctccacgctggaacggagccatgatttcctgtggcggtgcgtggcccgtcttccccggcggggaatgatcggcattttcaaccgttcctactatgaagaagtgctgagcgtgcgcgtgcatccggaatttctggcgggggaggggtttgatcccgcccatgccaagggagccttctggaaggagaggtacagatccatcaataatctggaacgccatctgctcgccaacaagacgcgcatcgtgaagatattccttaacctttccagtgaggaacagagaaagcgccttctggcgcggctggacaccccgcacaagaactggaagttttcagagggggacatccacgaacgcgagttctgggaccagtaccagaaggcgtatgaggaaatgatacgtcatacttcttcccgggacgcgccgtggtatgtggtgccggcggacaacaagtggtattccaggcttgtctgcatgtgcgccattgtggaggcactggcggaaatgaaactggaataccctaaggtctccggggaattgaaggcgttcttccctgaattccgggaggaactggaacgccccctgtccggggacagggattgaacgaagagtccgggaacggaagggaaagagaaaaggtcgcggaagaacggcaaaaagaaaaacggcgcatcatgcggaagcttccctccgtctgctgcgccgccgcattccatcccgtgcgggcctgccggttctttaatcagcgcctgcgttcccaggatttcaccttgccgttgatgaacagcacgtagccggtatccaccgggacgtaggtgacgtcattgtaatacgggtaatagggacggtagaaccccggtccccaataggggcctccccagtagggcccggcccagaaggagggcggcggggtgtaaaccggctggagggaagagtaaatccagcgggtggcggattttccgttaaggttgccttccgcgacggcggaggggtctccccaggccaggaagacggcgggcggcgacatgccttccgcaatctggccggcttccaccagcgttttctggctgggcggaagggaattgaaaagggctgggtttttctggatgcgggatgccggggtggacacgcaggaagcaaggctcagagcgacggccagggtagtgaaaagtaacttccagttcatgatgtacatacggataacactcactttgactcttgccaagggtgttttgttgagtaaaatgtacgaacacgttatgaaagcgctccgcaatctggctttaacactgatggtccccgttctggtttcttccctgtccgcagcagaaaagccggaaataatcgatgaatatctcccggtcggcaaaatggcggaagcttccgccgtcagcgttgtgcttgatgaaagccttcagccattcatggaaaagattgacggcgtttttgcctccctgcccgacaaggacaagaaggagctcgtcagccagatcgttcccggccagcccgttccgtatgacgaacgcctgggctggaccaaggatgagtatgccaagtatctggaatgctggaagctgaagcaggtgcaggaagtggcccccgtagctgtgggtattttcgcctccggggaacgcggcgtctggactctggccgcggtggcccagcagggaccgctgccgatgagcaccctgaagtatgactccaataccaaatcctggatttcccccaacggcgccctggccctgaaaggggacgtttcctatgacgatctgaacgtgtacggcgcatggagcggcaaggaatggaccatggaaaagaagaccattctttccaccctgacggagaccattatcgcgggcaagaccaaggacggcaaatatacctatttcgtttacaacatgtccgagaagaatccggataatattgccattgccaaccagtccatcgtgctgcgcatccccatcacccgcattacgggagaccccctgctggaaaaggccaaggccaaggcgcgccagtagggacaacaagacgttcctttcattccggtaaaaacatgcgtatcatcagcggaaaggccggcggcatagcactgtctgttcccaaaggggaagtgcggcccacgaccgaccgggtcagggaggcccttttttccatcctgaacccgctgattgaccatgccgacgtgctggatttgtttaccggctccggagccttcggcctggaagccctcagccgcggggcagggagctcccgcatggtggatttttcccggctttcctgcgcgacggccaaggccaatcttgccaaaaccggcctggagggcggcgccgtcatccagggagacgccgtgcagtttgtgaaaagggagctgctggccggcaggaagtacgacattgtttttgcagatcccccctactgcaagggcccggcggaccgggattttattgtggagctggcggaggccggagttgccggactgctgaaggacggcggcgtgtttattgcggaagtgcaggaaggctggggaaccggcatggaaggcgccgcggagtttgacggcctggacctggtggatacccgccggtacgggaaaaatatgctgttgttctatcgattgcctgagaagtaagatgaaagccttcctgttctctttctgttacaatgtcctgtacaccctcgggtggctggtgacgctgccttcctacctgctcaagcagaagaggcgcggcggcttcggcacggggttgatggagcgcttcggcctgtaccgggtttcctacaaccgggagccgaagggggtgctgtacgtgcatgccgtgagtgtgggtgaagtggtgctggccctcaaatttctccgggcgtggctccgggagcgcggcggttccgcggtgctggccaccagcacggctacggggcatgatacggcggtgaatgcccaggtgcccggcgtgcgcgtaatttatgccccctttgacctgctgggcctgccggggaggtgctttgaccgttttgaaccggaagccattgtgctggtagaggcggaattatggccgaactttgcccgagccgccaaggtgcggggcattcccatggcgatgatcaatgcccgcatgtccgccaggtccgagagccgctaccgcgcttttaaatgggtgtcacgatattatttttccacgctggacgccatgggcgtgcaggacaagggggacgtccggaggtttgaatccgtgggggtgcgcccctccatcatccatgtgacgggcagcatcaagtttgaccagcagatggcggagcgcaaggaaaccaatgcggagtttgccgccattctggacaagctgaagcgcggcaagcccgtggtgctggccgccagcacgcatgacggggaggaagtgctgattgcggaggccgtgcgcaaggcgggaggcttccccttgatagttccccggcatgcggaacgccgccatacggtggtgcgtgagttggaggcccgcggctggcagtgcgtgctgcggacggatggcgagcttccggaaaccctgaaggacaatgtctgctacattgcggatacgaccggagaattgagggattggaccgcgctggcggatgtggccgtgatcggcaagagctttctggcggatggcggccagaatccggcggaggccgttgcctgcggcgtgcccgtgctgacggggccgcacatggagaatttcgatgcgctggtccagctgcttgagggcgtggacggcattacccggtgcgatgaggagcgtctggcggacgtgctcaaggagatgctggacaatccgctgctggcccatgcccagtcctcccgcgcgcaggtggcgttgaaagcccatttcggcgctacggcccgcaccatccgcatgatctgcatcatgctcaagattcccgtttaacggcgggagccttttgcccgcgggcctccggcttggaatggagcggcagggcgaagacttccccctgcggcgcgtcaatgatgatgtcaaagtgctggagggtgtccacgcctatctggcatctgccgcctgttcccgtcacggcgaaggaaaggccgtccatctggaagtccggccccatgcggagggtggagggtatgcccagcttcatgacgttgcggtccccgctgtgtccgttgatgtcggaggccttggtcgtgagctggtttccatttgggtccgcgggccactgttccagcggggccagggaaagggaagaaccggaatcaagggccagcaggaaggcgtctcctccccgggagcagcggacatagaaaattccggatgggtggcgttccacttccagcggcttcatgttctgggagggaaagcgggagcgttccagaaattggagggaagcatcccttacggacagcaggaacggggagaagcccaggtagttgattcccagaatgccgtccaccctgacctgcatatctttttgaaggggggtgaggtccatggcgaggccgaagaaatttttaatgtgaagccctccgatggagaaggacttcatggcgaaaagctggggaacggtgttgacgttggagccgggggcgatctgcgcgttttcaagcggcaggccggggaaattcttcttgatgaatttgatgtcaaacgtggtgtgggaggccgccgtgtccacaatgagattgcatggaacgccgttaatggtgcattgcgccacaagaagtttgctgtgggcgtctctcgtcagccggacggggttcaggtccgtgatggaaacgacgggcctggcctgggcggggtccggctgttccgctgcggagagaggaagcgcgcccaatgccagaagggccgcggaagcgcggaaaaggctgcatgggaagagcatcccttactggtaagcgcgcctctgcggtttgacaagtcaatttgacggagaatcagtcatggctgcggtggttgggcttgtggcggcgttccagttccacgcggtcctcataattccgggcctgcaccttccggtctctcttcccggcccgttccacgttcatctgcctttttttctggcgtttggcaagccgcgcgatttcatcttccagattcaggaaattcaagtaccgctccctgtccaacgttccttcctccacggctttcctgatggcgcagccggaatccgtgccgtggctgcaatccgcaaatttgcattcctgggccagctccgtcaaatccgcaaagctttcccgcagggtatgttcatccgtccacatctggatttcacggattccgggattgtcaatcagcaggccgccgtgtttgaggagcaccagttcgcgcgccacggtcgtatggcgtcccttgccggtcacctcattcacttcccccgtccagagccattcgtcccccagcagggtattgaccagcgtggattttcccactccggaggaaccgacgatgcagatggtttttcccctggaaaggcatttgcggaattccttgattcccttgttgtgcagggcgctgatgccgatgatggagcattccggggagagttcccgcagggcctgcacggcttcgtccacttcctccctggagaaaaggtccgttttattgagcaggatgagaggggcggcgccgctgcggcggatgagcgtaaagtagcgctccatgcgcctggggttgaagtccgttcccggctccgtcaccacggctacggtgtccacattggttcccagaacctgttccgcgctgctttttcccggagctttacgggaaaaacaggtctggcgggggagaatggcgcgtatgacggcttcgtctcccgcttcccccgggtcaatcgccacccagtctcctacggcgggcagttccgcatccgtggcggcgtcatgccagagcttgccgctgacgaccgcgtccacgtcttccccgccgtccagcagggcggtgaagttgattttcgtttcccggatgaggcgtcccggaacccagccgggtttggcgacggcgttgaaagcgcgttgaaagtggtcgttccagcctaaatcctgaagagtgacgggcatgaaaggtgaaaatgcggttttgggggagggtggcggcgtccgtagccagccagcatttaatcatgctgcaaacgcctttccggttcaagcacggaacgggtctgccgcccggcatgacggacctttttcccgtgcgaggcggcacgcgcgttcgatgatctgaagggcaatctgtgttttaggcgctttttccagcagttccgtccggtccggataaacgagcaggacttcattttccgaggaattaaagccgatgtcgctgcgggaaacgtcgttggccacgatcatgtcgcaccgcttgcgctccagctttccacgcgcgtagtcttccacgtcatgggtttccgccgcgaagcccaccaggacgccgttgaagccgaattccgtgcgcatggaacccaggatgtccgcggtgcgctccagctccagaatcatgcgttcccccgttttcttgatcttgcggtccgggacggagacggggcggtagtccgccacggcggcgctgaggatggcggcatccgcatagggagcctggttttttacggcgtcatacatttcctgcgcgctttccaccggaaggaagtccacgccgtgcggaacgtccaggaaggtgggaccggagacgagaaggacgctgtggccttcgtgaaccgccgcttccgccagggagtaccccatttttccggaggaatggttggtgaggtatctgacggggtcaatcgcttccctggtggggcctgccgtaatgagaaaacgcatgggcggcattatgcggaatcacgggtaaaagtgaagagtgatcttgtgcagccgcgcattatgttccggcttgactccttcccgcgattgggggagttatgaaggcgtgatttactgggacaacaacgccaccactccgctggacccggaggtttacgcggccatggagccgtttttaaaggaacggtttttcaacccgtccgccggttacggctgcgccaggagcgtgcgcgaggcggtggaggaagcccgtgcggacgttgccgccctgctgggcgcgctcccctcggagattgtgtttacctccggcggaacggaggccaccaatatggctttccggcagatggccggggaacggaacggaggaataggcgtgctttccacggatcatgacgcctccctgaaaaccgccgtggccctgggccagggtcgagtctgtccggtggaccgggaaggccgagcggtcccggaaggatgggaggccatgtgcgcggctggggtgtccggcgtttcctttgcctgggccaataacgagacgggcgcgttgcaggaggcggcggctttgtgctccgccgcccggcggcatggggcgtccgtgcatctggacatggtgcagtgctccgggaaaatccctgtggacctgcacgggatggaggtggattacgcttccgtgtccgcccacaagttccatggtcccaagggggcgggatgcctgtacaggcgctcgggagccggcttttctcccctgctgttcggtggagggcaggagcacgggttaaggtccggcacggagaatgtgccggggatcatcggatttggagccgcggcgcgagcggcattaaggcatttggaggaggacgccggaaggctggcccggctgcgggattcctttgagtccctcctgcgggcacaggtggacggcgtgacggtgcattccggagggatggagcgcattccgaatacctccaatctggcgtttgacggatgcacggcggaggcgctgatgctgttgctggagcctgcggggctgctgtgctcggcagggtccgcctgccacacgctgcagcccatgccttcccacgtactgacggccatggggctgcccgacggggcggtgcgttcctccctgcgtttttccctgtctttcatgacgactcaggaggaagtggagcaggctgtgtccctggtggcggccgccgtccggaaggtgcgcggcgttcagtcttcccggaccggcccggtgcttgtgtataagccgtaacgacggttttttcctgggaggcggatagcgaggaaaggacggtgagtttcttccccctcccgccgcttgctgccctgaatttaggaagtctccgatggcccggtccgggtgcgcagggccttagaaacgtgaggaaaaaaaggggaacaagccatggccgcgcccatcctttttcgctggggagcatgactttctttcttgagctttgtggacgctccatgctaatttatatagactctgaaaggaattactgcgtacctgtcatgaatgtatgaaaatagaacattaccagaacaaggatgaaacggaggtcctgaatatttggctgaaagcgtccgaacaggcccatgcttttgcaggggtggggttctggtgcggcctggtggaggatatgaggcaggtgtacttgcccagggcgcgtacgtgggtatgccgggacggcggcggcgtggtcgggtttgcgtgcctggtgggggagggagagctggctgccctgttcgtggctccggagcggcagtgcgagggaataggcacggcgctgctggactgggtgaaggagcacagcaaggggatgctgacggtgggcgtttacgaggagaacgcccgtgcccgcgcgttctacaggtgcggaggatttgaggagatcggctccagggatgacgagctgacaggaagccgggagtaccggatggaatggaaaagagaaagtacctgataacaataaaaaaggcggaggctccaatgaacctccgccccggtgaagcagataagcgtcaggcaagttcaaccttgacgccgctcttctcaacttggtcagccatttcaggagaaagggcttcatcagtgatgagcatggagatctgtgagggcgcaacggtatagaatgccgggttgttcgctacgctggtggaaggcatggcgatgatcaccttggcatccgggggaatgacgctcttgatgaattcggattgcagcatgttcttgtatccggcgccatgcttgggggagtagcagtccggcgtcagtacaaccatgtcaatgctcagggaacctgcggccttggcggcttcctgtcccacatagaccagggcttcgcggtcgaagcgtccgcccgtgcagtagaagctcaggttcggaatgccttcaagccgggtcagcagcgtggggttgttggaaaccacgtgcgtatccctggaattaatgtggttgcagatctggtagcccatggtgctgctgtcaatgaacatgaccacggaagcggggatgttctggacggctttttttgcaatccttatggaaacatcgtcttgagtgacaatgtcttcatggagggatttatgggtaagggccagagcgccgccatggacgcgcttgagaaagccgcgtttctcaaggttaatcaaatcattacggaccgtttcatccgtgaccttcatctgtttggccagagcaatggttcttgcggctccatgttcggccagcgttttcagaatgaactctttacgttgggatgctaaatacattgggttctgtttttctatatagaatgtttacacgttctaggtgttaagttgttttctaacaatttttcactgtcccagtcaagcgttagaaattctaagttttgattgttattgtgaataatgcagattttgtaataatgggacaattgaataccgagaaatgtacaaaaataattttatgatgcacaaactagttatcggtatgacagagtttatcaatctggaatgataatggacgccggatcgaagttgggagtggggaacgtgagctggagatggcgcagtttttccaccatcaggcgggcgacgacgaggttcctgtaccatttccggtctgccggaatgatgtaccagggagcatccggagtggacgttttttcaatgagatcctgataggccgtctggaattcgtcccagcggttccggtcatccaggtcgtccatgcagaacttccaaagtttgtccggatcctggagcctggattccagccgtcttttctgttccgccttggaaatattcaggaacagcttgatgatgacggtgccttcttccgcaagcatggattcaaaatccagaacgtgcttgtaacgtcgcttccagacggggtccgggaagatttttttcacgcggacggcgatgatgtcctcgtaatgggaacggttgaagatggcgatctgccccttggcgggcacttccttgtgcacgcgccacaggaagtcgtggtccagttcttcaatagtaggttttttaaagggaaccacgtgcagcccctgcgggtccacccgggaaaagacgtgcttgacgcatccgtccttgccgcctgcgtccatggcctgcagaatgacgagaaccctgtgcttgtgctgggcgaagagttttttctgcagttcctgcagttcttccctcagcttgtcgaattcaaccagggattcttccttggttccggagaagagagatttgtcatccggagagtaatcctttaaacgcagttttttgcccggaggcaccaggtaacggttcattgtatgcgaagttaacgttgaagaagcgggagaggaggtggaagaggttttcatggcggcgggtttggccggaaaatccggcccgaagaattgctgaagggcgtccttgatgactttccttttgaatttggggaacatctccagcttgaggtcctggaggggtatccatttcgtttttgagaattcagggctgcggtgcaggtccgtcttggggcgcctggccttgcagcgcaccaggaagtaggtttgctcctggcctatccagcgcgtgactttgcggttgccggaggggtatttgtaccgcaggccggggaggcggctgacaatggtgtattccgtgggacgcaggcccacttcctcccatacctcccgcgcgagcgcccgttcaatgctttcatttttaatgacgcctccctgcgggaagtgccagtacgggttgcggccgttgtccttgcccagcagcacgtagccgtcggcgtccatgatgacggctgctgcgttgagtctccagtttttggctgtagatggagtgtccatgacgggagggggcggcttaactggcggtttgagccggcgtttccggctttccggtttccggagcggcattttccggttcatcctgccagatgaagtgttccagctggatgcggcgcgcgtaggccgccgcttccctggctctgggaccggaggtctgcgccagttttttagccagcgccagggcgccgtcccagtcctggagctggcccagcaggcggatggaggcgaaaccggcattgtagaaccagtgccagtcccggcgcttgttggcggaactgccgctgggcgtatgggccaggatggaggcgtagtcatccagcgcctttttctggtcgttcatccgttcgtagaattgggcccgctgggtgagggccttgaatttccaggccaagcccaggttgggggtgtccagaatttccgtgcacaggttgatggccttgcggagggtgtccgaatgggtgtcttccttcgtcacccaggcgtccgcctggatggagagggccagcaggcgcatgtagcgtggaaggggggaggaaagcaggttttccagagcggcgatgcattggtccgcttctcccatgcgcagcaggacggaggcttcttctatcctggcgggctgcgcaaagggggtgtcccccgcgcccagggttttgaagatgttcagggcggctttcagcgtattgccggtgttgctttgctgggcggcttttccggccaggaagagggccgccgcctggagggggctgccagggtatttggaggggaagggctggaggacaagctgcgcttcatggaaatccccgttcttgtacaggagttcccccagcttgagatagagcatgtccgcctgtttgccttccgaatccagggcgatggcctggcggcaggcctggatggcgctgggccattcctgccggctttccgcctccaggatgttcagccgtgcaagctgcatggtctgttccggagtcagctgttctttttccagcggcggaagaacggcctgcacggtttcaaggtccggcgggttgaggttcagggccacttccgcctggtccagccgggcttgggttttcagggccgggtctgtcgccagggccacgaaggacgccagcagttcgggagcctgggggttcattcttttggcggcgtaatgggcctgttcaaagaggatgtgttcccggagctgggcagagccggcggcttccttgaccagggcggcggctccagcggcgtcattggcgttcagcgcagccagattttcattgaacagggcgctttccgccgttttttcagaggcgcgccgggctgcttcccggaagaggctctgcgccagagggtagtctcccttgcggaaggccagggctccctgctggaagacgaggccgggggacgttccgggatatttggagataaggcgttccgcgtcttccacgcggtttttgtccagcagggcggtgatggtattcaaggaaagggtctggacgggaaggctctgaggatatttggagaggccgtcctccgccattttgacagctcccgccaggtcttcctttgccagaagcaggcttcccatggcatacatggctgccggctggcgtgccgcatccctggcattcacccagccggtgagtttttccagcgcctggggattggtgcggaagatgtcctcctccagcaggatgttgaaggcgtccatcagcagggaggattccgatttgccgccaatgaacgccagcaggcgttcttccgccgttccggcagtgtgtggggcttcctcttcctgaggttgggcgcgcgtttcctcttccgcctgttccgggttgtttttctcccggacgatttccgccctggcgagggccagacggcccagatcccggattttccccggataggccttgttgtccatgacggcggcgaagatttttatggcctggtccaggttcccctgtttgtcggccagtttgccttccacgagttcggcataagagcgcatgggcaggtccctggccgtgccgtcgtccattcccgtcttgaattgttcaagaatggcggcggcctccgcatagcgccccaggttcaccagaacgtcagccagaaggacatgcgcggtccgggagatggcgggggattccgcctgccccagcctggtgagggcatccagtaaaagctgccggtcctgaagctggcgcgcgagctgggctttcagctggaagccgtagagggagagcggatccgtttcaggaatggaggagagtttttccagggccctggtaaaggagcctttattaaagaggcccgccgccatccagtatgatttcatggaggagtctggaagttgttcccaggcagtcagtccttcttccgtttttctggcgcggatcagggcttccgccaggaaggggcggatgatggctttctgggattccggaagatttttggagttcaggcattcctgaaaatgcttgctggcttccaggggcaggcggtcttccagggctttcagaccctgctggtattttttatttttcaggagggcctgcctgtcctgcgagaggggatcctccggaggaggtgttgccgcggctgcagggggagtgccccccatggtgagcagaaaagccgcgcaggacgtaagaacggcaagggaaaaacggggactgaagaaggtgtgcatcatcgtaggattatgattcaggccccatgaagatgagccggatgtagcgtttgccggaggcggtcagcttcggatccttgctggagccggaaacgcggttgcaggtcctgtacagttgggagaagggatggggaacagcccggatgacggagggttccgtgcagggctggtcggagggagtcacggaaacgggaactcccgttcccgtaaagctgatttcccaggacttgggattggccggtcccggtttcagcaggaaggggtagcgtttgacaagattgggcaggcttccggtagatggagcgcgtacgacgtactgaacgggcagggaggagatatggcgggagagggagaattccgcgccgtccttgcactgcatgagggcgggagccgggtcaaaaccggccaggttcaggccgttgtaggcgccatggcggttgggggtacccagtttcaggctggaataccagttttcaaagtcgtcctggagcttgaggcaaagttccagatgcacatgggcgcgtgttttgttcaggcccactccggagtagcccagttttccgatgacgtttccggtgcctacccggtccccctccttgcaggagacggaagccagatgggcgtacaggctgtaaagcgggccgtccgccaattggtgttcgatcaccacatagcggccgtagttgctgtgggtggggttggcggaagcgtggaccacggtgcctccggctacgggatgcacgtcgtccagcggagtgccggaggcgtcgcgcctgaggggcttgatatcgatgccttcatggaatttgacggctacggggcctgcctgggttctgacgagggtccgggtaaagccgtaggctcccgcctcccagggctgggatttcttcccttcaaagttccggtccacgtacatgtagaagtcctgcggacggttgtccagcagggccgtgttttccgtggggaagcgcacgacaatatccgccatcaggaatggcatgctccagaagaacaagaggatgccgatcagggaagggaagaacttgccgtgcatgctcatacagggggtgctggatcagatccgcccccggcgggtgctgaccacggtgcggtccttatgttcttcgggctccttggcttccttcttttcctgggtggggtccttgatgggaagaaggggcttggtgacggcggccagcttgttgatgggctcttccctcttggggtccgccggaggaatgaattccgccatggcggcaaggtccgccggggagaagccgcccatgacggccagtttgccggaggtaacgggtttgttgtaaaggcgcagaggctgcatggcatgaccgttgacgaccggcagtatctgcttgccgaggttggcggcggttactccttccacccggctgtccaggccttttctgacattgactacaatgccgtaggtattgtcctctgccgggaaggagtagtaggattcaatgtccttctgggaaatgaagggagccttgctgtagtaatgcccgtcccgctcaaaggcgaattttttgctgtccgtcgctcccgtctccatgtggaagctgacgggatacttgtccgggccgcaggagcagagcatgagggagccaaggaagaacaggagcattttcataatgtccatgataaaagatttagttctccctgggcaaaccaataaacaggcatggagtaattttatgccgccgttacggcaggagggagagcgttttttgaacaatcaggtccacaggcatcagttttcccgctccttccgctccgcaggccagcacgccggattcacagggccccagaatgcagtggccctttctttgtttcaggacggccgcattttgctgtgtggccgtgtgttcccacatgtggacgttcatggccggacagatgagcaccggggcctggcaggccagatagagggagctgagcatgtccggggcgaagccgtgggcgaagttggccatggtgttggccgtggcgggggccacgagcagaaggtccgcccgctgggccagttggatgtgcgggggaacccagtccgccttttcatcctcaaaggaggagaagacgggattgcgggagatcgtgtgcagggtgagggctgtaacgaattccagggccttggccgtgcagacgcagtgcacctcatgcccgcttttgacgagggcggaagcgatgtccgccgccttgtacgcggcaatggagccggtgatgcccagaatgatgcaggccatgggtggggaggggtcaggctttggaggcttttttgccttcgtcaatgagtttccagaagtgtttggactggctcaggatttcatcttctcctgcggtcggggagatgttggtgcggaacagaaagtcgttcaggctgttggcgtgcagaacgcggtggacgaccactttgccttcaatgacttcaaagtagatgcggtagtccctggctacgtagcggtaaagaattttgccatccttttccatcttgccgaagcgggcgtcatcaagggtttggagggtggattcagagacctggaagtccccgagcaggtccagttgttccagggtggggatgctggatacttccgcagcgctgattttattgaagacgatttgaagcacgcccttttttaagtgcgccggcgggttagttcaagcctgaaacaaggcacgggccgattttgagaaggaccgttccgaaccccggcattcccttgggagccggggttccggattaacgggagtcctgcgtggggatgatgcccctgctttttaccacctgggtgccgcgaatgacttcaacggtcagaggcttttcccccgtgaggtaataggtggcatccagcatgtccccgtagttgttaatggtcgtgccgttgatgctgatgaggatgtctcctgtctggatgcctccccgcgcgagagggcctccgttaatgaggccttcaatgacgggagtggaggcgttgatatccagcaggcatcccaggcgcaccctcttggcttccggatgggctgccaggaaggagatggcctgggcgggcagcaggtggcaggttcccttgcgggaaactcccagcacgatgccgaccagacggttttcagcgtcatagcacggctggccgatgggcggcgcagccagtttggggaattgggcgcggacaagacgcagcgggaagctggtgtctcctatggagtgctccatgcccacgtaaattcccagggtggtttcattccggctgctggcaaaggccagcttgtcgccgcgcttgagaaggccggagggcgtcacaaccgcctgcccgtcgtgtatgcgggcagcgtccaccttgaaaatcgtcaggcccgtgagcttttcctgggcccatacctgaaggggaggggtgtccttgtccccaaggtagtaggtcacaccgccgtttttaaagacccggtagggaatcagggagacgagcatgtcttttccgacctgcgccgccatggccgtgtacggctctccttccgcctggtggggaatggcttctaccttaaaaggggcaggcacggccgccgcttgataaatcaagcctgcaacggctatgcccgccaatatcggagccaggttcatcatggattgttacatctcgatgagaactcgggataccggttttttatcggtattggaatcagttttcagctgattgtcgttggccgatgtttcatatgaaggcgctcccgtggtgaattcgggtttttccgcaggggcgacttcggttgagggttgttcaatagtttccttacttacgggaaccgctttttccttcaggagaatctcttccttatccttggtggaggatgcgtaagagtcggaaggatcatccatgttcccggatgcgataataacgcctaccgcagccaatgtcacgatggacatggaagcatagacccactgccagccacgaaagttctgcagatagttgtccaggcgttcgagtaacaatttccaagcagagtgggtagccggatcggtttcctttctaagatgaaaattgcggaggaaatcttcttcaaagttgtcatggtaacaagcttccttacggaaagatgccagcatggcaaccagagtttcctcgttatgttctgtggattgtttatccatcgtcgttgatgttaagtgtaataaaggttagggtgttttagtcccgaatctgggactatgcgtttgacagggcggagggaaccgatgttcaatattttttccaccgttaactcagatattccgccagcaggccttgcagctccttgtgggcataatgcagacgtgatctgagcgttccttcagagatgcccagaagggcggatatttccgtgtggttgagtccttttacatcatgaagcacaacgacttccctgtgcttggtggatagttttttcaatgcttcattaattttgagctgaagttcgttcagatgggtgcgtcgttccgggtccgctccgtccgtttcgtcagccatgttcatgtccttttccgtatggtcgccgtactcgtcgtcgtccaggctgtaggtcatcctgcggttgcgttttttcaggaagtttctggcatggttgacggcaatggagtgcagccatgtataaaaggcgctttgtccgttgaagtagcgcaaggcccggtaggctttggagaacgcttcctgggcgatgtcataggcatcgtcgtagttgtccgtcatctggtacagggtggcatggagcttacggctgtggcgaatgacaagttcgtcaaaagctcgcgaatctccctcccgcgccctggcgaccagttcagtgtcttccaaggtcgtatatgcaatgggtcccgacatattagcagcagaatacccaaaaatagggacccgctacaagggcaaatcgtatgcacgcccccctttaccctcaaaccagcgcatgtatgccacattaactgtggtatatccgcccggagtcgggtagtctccggtgaaataccagtcgccgcaggggccttctatggattcatgcaggttttcgatggtctggaagatgacttccacggggcacggggcgtcgtgcggagtgaccaggcgggtgatttcacgggagatttcagcgtccgtcaagccttcgtaaatggccttgacgcagttgcgccgttcttccctgggcttggtcagttcctccttgcatgccttgtatacttcttccagcaaccgggcctgcccgtgctgcttgatcagggagactgccgcctggaaggcgatgaagttccccagttcggacatgtcaatgccgtagcagtccggataccggatttgaggagcggtggaggcgacgacgattttccgcggattggtgcggcccaggatgcggaggatggaccttctcagcgtggtgccgcggacgatggagtcgtcaatggcgacgagcacgtcttccggtcccacggccccgtaggtgaggtcatatacgtgggagacaagctgcgcgcggctcttttcctgcgtgatgaaggtgcgcatcttgatgtccttgtgggcgattttttcaccgcgcggccaccgtttcaggatggcgctgtccagcatgttttcatccagggtcccgtttctcagggcttccagtagctgggcgtgcacgcgcttgcggcggtagacgcgcaggccttccagcaggccgtagtaggcggtttccgccgtgttgggaatgtaggtgatggcggatttgtcaaagcggtcttccagggagtccacgatctgcggggtcagcgccgcgcccagggccttgcgttcccggtacacgatggggtcgttcccgcgggagaagtagatcttttcaaaggaacacggcgtgggtttcaggggcgtggtgaattccgtgatgacgtgcgtgccgtccgccttgatggaaagcatgttggccggcggcagttcctgcacctgttcgctttccacttcaaagacggtcatcagcgggacgcgttcagaggccacggcaatgaattcatccgtaatcaggtagtggcaggggcggatgccgtgcgggtcccgcaggcagaagtagtccccgttgccgatggcgcccatgatggcgtagccgccgtcccactgtctggctgagttgtgaatgatttcctggatgttgagccgggaggagatggcatgggggatttccgggccgggcatgccgctgtcccgcagggcgcggtaaaggtccgtatgggcttcatccagatggtagccgatttcttcaaggacggtctgcgtgtccgtgccgaagacgggatgctggccgcgctcaatcatgcgctggttcagttccggcgtgttggtcatgttgaagttgcccagcaccatcagggtgcgcgttggccagttggtgcggcgcaggtagggatggcaggagccttcgtcaaagaggccggaggtgccgtagcggaggtgccccatcaggatttccccgccgtagtcaaagttgtttttaatgtcttcagcgtctttcaggttgacctggccgcggcggacttttttgttaagcttcttgatttgcccgttgaagatggtggtgagggcgtccttgctggcgtcccgggtgcggaacaggtagggctggccgaggggcatgttcagtttcacgcagccgatgcccgcgccatcctggccgcggttgtactgcttttccatcaggatgagcagcttgttgaacgcccagagggtggagccgtatttatcctgaaaataagagagaggcttaagcagacgaatggcggctacgccgcactcgtgtttaagaaaatcgctcatgggattgtgatgaaaagattgtcctgtaagtgtggtgtatccgctgcaaggagatggtgccttctctattcgccctgtaccttgacatgaatgccgcggccttctctcaacgtgccgatgacggtgccgccggggcctgccttcagcgcggcttccacgtcctccggcttcacgatggctacccagccgatgcccatgttaaaggtgttgaagcggtcctgcgggtccacatgcttcaggattttctgggctgcggtgttgtcccagcagggaatggtgaggtccgcgccgtagtcgcccaggaagcgttccaggttttccggaaggccgccccccgtgatgtgggcgtatgccttcgggatgacgttgaagcggcgcatgtccgccaccacgtcatggtacaggcgggtgggctgcagcagggaacggagttcctcttcatcaaccacgtccgggttttcctccagaatgcggcggataaggctccagccgttggcatggaagctgtcggatttgtagccgatgaatacgtctccggggcggacggtcttggggtcgatcagcttgcttttttcacagcatccgatgcagaagccggagagttccacgatggattccggaaccacgccgggcatttccgccgtttctccgccggccaggatgcagttgcaggattccagatagtcgcacatgccggccaccaggcgggtgatgcgggtacgttcctgttccagattggagatgcccaggtagtccaggaaaagaagagggtctccgcccgtggtaaggatgtcgttgacgttcatggccaccaggtccttgccggcggtttccaccatatccagttcgaaaaggatttccgtcttggtgcctacgccgtcgcatccggtgacgatgaccggttccttgtaggagctcaggtcataggcggcggcaaaaagaccgaaggcctggtgcagggatctctgcttttgcgttcttttaacgtgagagctgatgtcggatacgaaagcggctgcttctttggtatcgacccccgattgcttgtaggttagtttgccggacattgaacggatggactgggtgtgccagcatcctaaaggaaggctcctgccgcggcgagtgaaaaaagaagtatttttgccataggccgcgcaggaggaagcctttttattccacttctatcttgcagtcgcgccagagccaccaggcatccagcgagaatttgcccggtcccgtgtagaagagggtcaggtaaatcagcagatagatggcggcgagctcctgtgcgccccagccggagaggcccaggacgaggaagagagccacgcacatgttgatgatcaggagaagagaggccaggcgggtgaagagccccaggaagatgaggatggaacatccgaatcccgcgcctacgcacagcagcagggacaggaagttgccgattcccagcgggtcctggaaagccgcccagtttccgctgatgagcattcccagcttggggatgccgtgcacaagcatcatcgcgcctacgcccaggcgcagcaataggacgccgaagtccatgctggtgttggtggagaaagagcccagcaggcagcacgcggatgatttgcatttattctgttccatgcactgtagaccgttcgtgcggcagaaatgctcaaataaaataggatgaaatgaaatatccggaaccaggaggaagcggcctgctgcgcggacgttccgtttgaggagaagccgggcactttccacagtttccggcctgccggcagatactgccgcgcgcgggtggagaaggagataatgtttcttattgaagaggctggcagacagcctcttcaataggtttttcaaggggtgttcaatgcttttttgcgggaatcaggcggaaggcggagggggatttggcggatttgatttccaggggcttggtcgggtccttttgagtttccgcgcctatggtgatgataagcctgtctttggggtggatgacggtggcgttttcaaagacgagcgtattggagccgtccgtcagcttccagccgtccagcaggatgccggagtctccgggattgttgataatcacgttgccggtgccaggttccagcttgggggcgggctgcttgagcttcatgctttttgccagcttggcgaaggtgatttcagcaatgcgccgcgcgcccggctccgtggggtgcaggccgtccacataccattccggatgatcggaaagggggtgcagcgcgtcaaagaggccgaccttgtgcttgcgcgccacggtggcgatcagtttttccgcttccggacggttggccgcggagccgttgtccgagcctgcgtatttgcgcacatccgggtagcagttgccggggaacgcctttttgttgagcgggccgcggtagtccggacccagcaggccccaggcgaagaatctggccttgggattggcggatttccaggcattgaacaggtcgtcataacccttggcgaacagcttggggtcccaccagcggcccgtatcgttgatgcccaggttgcagatgtaaacgtccgccttgaattccagggattgcttgtgttccttggtgctgccgtaccagcggcccacttggcccggatagtcgcccgccgtttttccggggttgccgaatccccggacgtcaaagtccgggcccatcagcgtgccaagcacctgcggataccgggcatctccgggttggaggccggagccgaaggtgatgctgtcccccacgcaggctactttggtggggacggcctgtgccgcggtgcccagggaaagggccgcggccagggaagcgaagagaagatgaaggttcatggtatggtggagtgagaagggttattttttaggagtgggcgcatccgtgcggaaggggcgggcggggagctggtcgccgttgaccaggttgggggtcacgaagcggttccagcagtaccgtgcgtgtttgggggatttgacctccggggaggtgaggcggatgacagcggtgctgcctttcctgttcgtgatttccgccgtggcgggatggtaagcgccgtccgccccggcaatttcaaactgggccggttccttgccgtccgtcgtggtcaggtctttggcgtgttccagttggatcagaagggcgctgccggagggtttgaaggctttgaaggaggggccttcacagggaacctttttgccgtaaaccttgttgagtgccgtgttccccgcgcgttctcccacgggacgcttgaagggggggtggacatcggcgttggtggaacccaggtcaatggtgttgacgctgtagacctgcgggacggttttggctaccgtgtcctgcatttcccggaattccggccagccggcacggatttttgacggatcgttgatgcgggggagctgaatcatgacgaagggcatttccggattgcggaaggcttttctccaggaggagatcatggttttcagcagcatgccgttctgttcgttgtcaatgatttcagcgtcggattcgccctggtaccagatgacgcccgtgatgggaagggctgtcatccacgcgatgccggattcataaaggaacgccggtttgtaaggatggtccggagacccctggtccagacgcggggagatgttttttctggcgcgtccccttacccagtcggagatgaggggggagtccagccagtggttgccgcgcagggtgcggaagctgctgttggcattgatgacctgccggggaatccacgccgctatttccgagccgcccagggaggaatggatgatgcctaccggaatgccgagcccttcacggagttttttgccgaagtagtagccgacggccgccatcgggcccgaggcggcgggggaactgacggcccactgccccttatagaatttgtccgtagtgacggcatcaaaatccttgtcggaatagggggcgttgttcgtgtgggcctgtgggacgttgttgaacaggcggagctgctcgtccgcggaggcggctatgtcttccttggccgtggaggtctggttcaggcggaacagcatgttggactgccctgaggccagccacacttctcccaccagcacgtcgtccagcttggaagagtctccgttctgggtggccgtcagcgtttgtccctctgcgctgggtttcatggggggcagggtgacgctccattttcccttggaatccgcctttgttttcagggaggagcttccgaaggtgacggtcacttccttgttgggatcagccgtgccggagacgggcacgtttttcccgtggggaaggaccatgtgggaaccgaatacccggtcgaattggggagcggccgcccaagccgcattcagggcgatggcggcagccaggatgcatggagtatggagatgcatgatttaacaggttatttgagaaggagttcgtcccgtgtgaggccggtcagccgtccgagccgtttgatcaggcgcgtcatgatgaagacgagggcgaccagaatgggcaccccgatgatcaggaagccccaccaggtgatgctgccgatggccacgttgtaggccacctgctgttccgcctcaggctggcgcatgacggaggacatgaaggagaggctcaggaagaagttgccgatggaggaggcaaccagcgtgcccgccagaatccaggacgagtttgccagcaggcgctggtaggtctgttcctcgccgttggcggccaccgcctgttctatcctgcgcacgtcaaacagctccggcgtgtaaatgaacatgttgagaaggggggagccggtggagcgggagacgacgaccgccgccgccaggatgaggggaatcagggcctcctttccggcaaacagccagggagtggcgctgtggatgtgcccctccggcccgatgacgaagatgctgatgacgcccgtcagcagcacgccggccatgcctacgccggacatcaggtcaaatttcctggtgacgaccagggaacggattccatagaccaggggaagggaaagggcgaaaacgagcgcccataccgggccgatgtgccagaagctttcccctgccggacgttccaggggattggcggggcccgcgctgcagtagtccagaatcaataccgggagcaggatgttgatgaaaattcccagcagggaggaacgtgagttgttttgcgttttatccatgaattcggaggcaggtacttgtatcatacgcagatgcgtccccgcaagttgcaaccccgtgtgtgaatgtaaagaccagaagcggggggaggcggttttttcctccgcaggcggccccgcggaaatcgtggcatctgacggcatcttccgttcttttggctggacacaggtgtgaataatgttcagcttctcccgtgactctgacagatcatttttcccccatgactcaaacatcttctttttcgacgcttggcatttcgccggagattctggaagccattgaagtgctcggcttcgatactccttccgccattcaggagcaggcgattcccgctgcgatcggagggtccgatatcgtggggctgtcccatacgggttccggaaagacgcttgcctttgccattccggccctggagtgcattgatcccgaggagcggaatgtccaggtgctggccctttgccccacgcgggaactggccgtccagatttgccgggaggtggacaagctggccctgttcatggacggcgtttccgccgttcccatttatggcggttcctccttccgcccgcaattggacgccctgcggcgcggggtccagttcgtggtgggaacgcccggccgcgtcatggacctgatggagtccggtgcgctgaagctggacaatctccgcatgctgattctggatgaagcggacgagatgctggacatgggctttctggaagatattgaacgtattgcggagttcatgccggaaacgaagcagaccctgtttttctccgccaccatgtctccggaaatcaaccggctggtgaaccggttcatgaaggaccccgtccagatcaccattgagcggcccacgctgacggtgcccaccattgaacagtcttattatgaggtggtattttcttcccggattgaggtgctcagccgcctgctggacacagggaagatcaagatggggctggtttttgccaataccaagaaagtggtggacgacattgtggacggcctgacggcccggggttatcccgtggaccgcctccacggggacatgccccagatcatgcgggagcgcgtgatggattccttccgcaaggggagcctgcgtctgctggtggctacggatattgccgcccgcggcctggatgtggacgatgtggatgccgtggtgaattttgaactgccgcgtgatccggaggattacgtgcaccgcatcggccgcacggcgcgcgccgggcgcaaggggaaggccatcacttttatggggcgccgtgatttttccctgatgagccgcattgaacgcttcatcggcgtcaagctgactccggaacccgtgctgaccgccgttcaggtggaccagctccggacggaatccctggtggatgacattctggaacgcctcaagccggatgccgttctgccggaggaattgaaggaagtggaagccgctccggaagccatggccgccgccctgtttgatttgctccgggagcgcacgcaccgggaagtacagcccattccggaggacaagcccgcccgcaggacgcgccatgtatcccagcccggagaagaggcggagagcccgcaaaagggagattcctggcagcacaagggggatacggtcacactgttcatgaacggcggcaagatgatcggcctgcggcccaaggacatcgccggattgttttacaatacggtggaaatggagaagggcgccgtgggcgatatccggattttccccaagcattccctgattgaggtggacgcttccgtagctccccagctcctggacgccctggctacggccaccgtctgcgggtatgaggtcaacgtccgcgaggacaagggcacgccggaatattccgacgggccgcgtccgccccgccgcagcggaggtttccgcggcggctaccgcggagaccgggaccggagcgaccgcggcggattcaggggaaaccgcggaggtttccgcagtgaccgcggtgaacgctggggcgaccgcccccgcagggacgacaggaagaagcggttctgacgcttccgcggttccggacacgttacttgcgtccttccggaaacggttttttccacgggagcggctgctttactggagtttcagttccatgggcacggggtccggattcaggaggatgcctttccggtaggcggtccccgcctcctcgtcgccgtttttgtactgcttccacagcctatgcagcgtatcccggttgcctgggatgcgcaggaaatcggtgtgggccttgttggcgtgtttgccccatggagccatgcccctggcggatttcagcatttccagtccggcagacagttcctttttttaaatggcgccctgccatgcagatttggaagatctgccgttccggcacgccgtatgcctccggattccaggcgccccccctgtaaacgatgaacagatccttattctctttttcggcttgtgcggcggctttttccaggtcagccattcacacgtccagcccgcagagcgtaccggagggaagcagaagggcggatgcaatcaatagagtatggggcagtttcatagttttttcactataggtctgatacagcaatcatcaattccctttccgtttaattatcttgagagatgggagaattcatgtaagatcgcgctctgttttaacgtttcccctacagtctattttcatctgaatcatgaagctggtatctttcctatccgttcttctgactgccctggttccgtgcatgagcgcttccgggcaggctgcgaagcccgcagcccgggccgtcaagaattcaaaacccaatgttatttttattctggtagacgatatgggctggggcgatctggattccaactggagccagcagaagctgaacgggcggacggtggacaggaagaacgagttcaagaccccggctttgtccgcgctggcccgggaggggattcaactgcgccggcattattccgccgctccggtctgcgctccggcgcgcgcctccctgctgctgggggtgcaccaggggaattcccgcgtggtgaggaacaaccgctttgaccatcccattgaagattcccatacgctgggcaccgtgatgcgtgacgccggttatgataccgccgccatcggcaagtggggcgtgggcggcggcggtgaaagccatggtccggtgacgggcggcccccaccagcgcggcttcaattatttttacggcatcctggaccatctggccgggcatttccattatccttccgagtcccgcgacattttcgagtacaacggttacgcctccaatcccgaatggaagaatatcaaggacaaggttccccagaccgcctattccacggatttgtttgccgcccgcgccaagcaatggattgtggaccagcgcaagtccgcccgcaagaccggcaagccgtttttcctgtacctggcttttccggcccctcacggcaacctggtggttcccggaacgccctatccttccggcggcggtttgaagggcggcctgcagtgggtgaagaagaacggcacggaatccgtaaatacggcttttgacgccaaggcggaaaaagacaaggacacgtacatttatccggacaatgcccgcttcccgaatgaggtggccaaacggcattccacgatgatccgccgcgtggatgatgccgtggcggatttgattcatctgctgaaggatttgaagatcgacaacgatacgatgattgtctttacctccgacaatggcccccacaatgaaggcggcgccgaccccaagcacaggcatggggcgcagaatccgcagtttttcaagagttacggcatgatggacggcatcaagcgcgactgctgggaaggcggaatgcgcgttcccacgctggtacgctggcccgcccgcattcccaagggccagatcagcctccagcccggacagttccatgactggctggctacgctggcggatgccgccggagtgccggttcccgcccgcagcgacggcgtttccctgctgccgacgctgacaggccatgcggaccagcagaagcccggcattatttattccgaatataatgtcggcggcaagacgcccggctacaaggatttcctgggcgaacacaagggagcggaacggggccagcagcagatcgtctttgtggacggcctgaaaggcctgcgcatgggggtgaaggacgcggacaaggatttcatgattttcgataccctgaatgatccgcaggaaagcaaggaccttgcttcctccaagccggagcttcaggcccgcatgaaggccgctgccctgtccaaccggcgtgcctcccttccttccaagacggtgtttgatacggcgctggtcccggcagtggagacaaaaggggctgccttccccggtttgaagtggtccctctatgaaggggagttcccctgggttccggatttccgtcagctcaagaagcaggctgccgcgcacggcgtggctccgtcgccgtccgtcaagatgaacggtccccggaagcgcggggtggaattgacggggtttgtgaaggtgcccgctgacggggagtatacgttttacctgtccacggacgcgaacaaggggagcaaggcctttgtccgcctgcacggcatggagttgattgacgcggataagacttacgaaccgggagccgaagtttcctccgatttgggcgaccggaagaatcccgtttatttaaaggccgggttgcatcccatccgcatcggctatgtgggcaatgccggtcccgcctccaagctggtcttgaagtgggaaggccccggcttgtccaagcaggagattcccgcgtctgcgttcagccatgatggcggggccgaataagaacctccgatgagtgacctttacgagtaccaggcgattgacggttcctccaagggacccgtctccctggtgcttctgattcaggctcgcaaccatgggcggctgtccaaccgtaccttggtgaggaagcttcccgacgggggctggcagccgctgtcttccttcattccctccatgaccgtcatggatgccgatatggaggaatcagccatgccggagcccgaaaccgggggagagcccgccattcccgcctggacgcggaaaaagtattggacgcgcatcattaagggatggtgcagttttgaaggacgtgccggaaaacaggagatgcgcgaggtttattccaccatgggcatcgcgtggctggtcgtggcaggggttccgtccatcatgaaaagcggttttttttccgtgtcccccctgttggagctgctttttcccctggcttatgtggtgcttcccgtgttgtttctccctctggcggctacgatggtgcggcgcctgcatgatgtggggaaaagcggccttttcctgatatggctggccgtgcccgtagtgggctggctgctgttgctgtatttgtgttatggggagagccttccgggagagaacaagtacggtgatccgccctggagttgaagaatgaagccggaagctggacgcattgaaggagaacaggccgggatggaacgtccggttaagggaatttctgcatgattgcagcattgaaaatgaacaggttttttgttacactggttattctggttcaaagcgctgcccatggcttctcccagatggaattcaccattggcctttttgatggcggcaggaacagagtggttccggtaaccgtttatcagccggagaaggaaagctccgagacaaaggtaatcattttcaatcatggctatgacggaaacaggaacgtcaaatccagccagacatattcctatttgaaccgttttcttgcaggaaaggggtattatgtaatcagcgtacagcatgaattgccccaggatccgcttctggcaatggaagggaatttgatggaggcccgcatgccgaattgggaaaggggagtggaaaatatcctgtttgccattcaggagttcaggaagctgaaaccgggattggattggggaaagcttattctcatagggcactcaaacggaggggacatggtcatgctttttgcggccaggcatccccttttggtcgataaggccatttccctggatcaccgcaggatgaagatgccgagaatccggaaaccgcggctgtataccttgaggggatgtgattatgaggcggacgagggagtgctgcccggtataaaggagcaggaggagtttcatatgagggtggtgaggctggaaggagttacgcatagcggcatgggagggggcggaacggagaaacagcacgagctggtcaatcggtttgtacttgagtttatcaagtgaggtccgggttgcccgttggtagcgcgatgcccagggaagagattttcctcgaaggagcggtcttgttctgcggaaatagaaagggccgtccccaataaatggaacagccccttccaggttgaaagttatatttggcgttacgcttccacggctttggagaattcctccaccgtgtcacaggtgcagaccaggttccggtccccgtagacgttgtccacccggcccacgtatggccagaatttgtggatgcgcaggccggctaccggataggccgcttcactgcgggagtaggggtgccgccattcgtcggcggagaccatttccgcggtatggggggagtttttcagaacgttgtcttccttgtccgccgtaccgttgataacggccatgatttccgcatggatgcgctccatggcttcaatgaagcggtccagctcctccttgggttcagattccgtaggttccaccatcagggttcccggaacggggaaggacatggtggggccgtggaagccgtagtccatgagacgcttggcgatgtcatccacggtgagtccggcgtcatgggtgagctggcgcggatccaggatgcattcatgggccaccagccccttgttgccggagtagaggaccgggaagagggggccgagttttctggcgatgtagttggcgttcaggatagccatttccgtggcttccttgaggccttccggtcccatcatggacaggtacatccagcagatggcggcaatggaggcgcttccccatgctgcggaggccacagctccttcctcatggcccagcgtgaggtggccaggcaggaagggaacgaggtgttccgccacgccgatgggcccgatgccgggaccgccgccgccgtgcggcatcgcgaaggttttatgcaggttcaggtggcagacgtccgcgccgatgcagccggggcacgtcagccccacctgggcgttcatgttggcgccgtccatgtacacctggccgccgttggcgtggacgatgtcgcagagttccctgatggtctgttcatacaccccgtgcgtggaggggtaggtgaccatgatgcaggagaggttgtcccggtgggtttccgcctgggctttcaggtcctccatgtcgatgttgccgccttcgtcacatttgacgggcaccaccttgaggcccgccatggcggaggaagcggggttcgttccatgggcggaggtcgggatgaggcagacgtcgcggtggccttccccggcgtgcttctggtagcggcggatggccagcaggccggcgtattcccccgccgcgcccgcgttgggctggagggagacggcggcaaagcccgtgattttcgccaggcggtcggacaggacggagagcatttcccggatgccttccgactggtccgccggaacaaagggatgcagggagctggtttccggccacgtgatggggatcatctcggaagcggcgttcagcttcatcgtgcaggagcccagagggatcatggcttcgttcagggccaggtcccgtgattccagacggcggatgtagcgcatcatttccgtttcggaatggtaggagttgaaggccgtttccgtgcagaagggcgtctggcgcgtatgggctggggcccaggcgggagtctcgcagcagcagggggcggaggtttccgcgcccgcaagggcggaggccagcgcctctacgtctgcgcaggtagcggtttcatccagggaaatggtgacgtggccggcatccaccttgcggatgttgtaacccgcttccagggctttccggaccatggcgtccgcctggccggggacggtcagcagcagggtatcaaagaagtccttgttttcaatggtgatgccggcgttcgtgagcgccttgtacaggcttttggttttccggtggatttccgtgccgatgcgcttgaggccttcctgcccgtggtatacggcgtagaaagcggccagcacggccagaagcacctgggcggtgcagatgttggaggtggccttgtcacggcggatgtgctgttcccgcgtttgcagggccaggcggtaggccgggcggccctgggtgtctatggacatgccgatgaggcggccgggcatgcggcgcttcagggcgtccgtgcaggacatgtaggcggcgtgggggccgccgaagcccatcggaacgccgaaacgctgcgtgttgccaatgcagatgtcagccccgaaggcgccgggttcccggatgacggtgagggacatcaggtccgccgccacgacgcagagcgcgcccgtggcatgcacgcgggagaagaagtccgtgtagtcgcagatgcggccgagcgtgtccggatactggacgagcgccccggccaggcccgcgccgacggaggcggggtcaaaggaggtccagtcccccaccaggatgttgacgccctggaaggcggcgcgggtgcggatgacgctgatggtctgggggtggcaggtgtccgccacaaagaaggtgtttgccttggggcgcgcgttccggcacatggtgacggcttccgcggcggcagtgccttcatccagcagggaggcgttcgccaccggcaggcccgtcagggaggagaccatggtctggaagttcatgagcatttccaggcgaccctgggcgatttccggctgatagggcgtgtaggccgtataccagccgggattttccagtacgttgcgcaggatgacggagggcgtgatggtgccgtagtagccctggccgatgaaggttttcagaagcttgtttttccggaggatggaacggagttcctccagggcttccgtttccgatttggctgcgggcaggttcaggggatcctgcatccggatgtctgcgggaacgatgtccgcaatgagttcatcaagagtttggtagccgaggctgtcaagcatctcccggcgttcttccccctgggggccgatgtgccgtctggcaaagtctgagtgggtattcatgtggtatctggcaggtaatggagcccggccgcgggggccgggttgaattcaaaatgccccgggatggaatcaccggggcgggggagggaggaacgggtcaggaacagtattcctcgtagtccgtggcgttcatcatgtcttccgtttccgtgggaacgtccaggcggattttgtacagccagcctgctccgtaaggatcggagttgatgagggagggatcattggaaagttcttcattcacttccaggatttcaccggaaaccggggtgtacacgtcactggcggccttgacggattccacgacggcgacggggtcgccggcggcaacggtggcgcctacttcgggaaggtctacaaagactacatcggagagttcggcctgtgcatggtctgagatgccgatggtgccgatgtccccgtcaatttcaatccattcgtgatccttggaatacagcagattttctggtacgtcgtgcataagatgtaattgtttgaggtgagagtgtagtaaaatgcagtgtttgtcagtttatttttgcgccgtagtgtcaacctttcttataaaagggttttttaactaccacggcagggaatttccttccccttacgtcaatttccagctcggtgccgaccttggcatgggcgacaggcaggtaggccagggcaatgcccttcatcagtgaaggagagagcacgccgctggtaagttctccgatggcttctcctccgggaacgtgaacggcatagtgggcgcggggaggagctcccttgccggtgtattcaatagccaccaggcgctgggtgaggccgttggctttctgttcacgaagaatgtcggcgccggtgaagtccgtatccagcgcgcaaaagaagccgagcccggcttccagaggcgttttgtccggagcgaggtcggaaccgttcagaggatagcacatttccaggcgcaggctgtcgcgcgcgcccaggccgcagggcttggcgcctgcgtcaaggaaggcttcaaaccatttggcgccttcccgggccggacagaagaattcaaagccgtcttccccggtatagccggtgcggcagacgaggaggtccgttccgtccaccgtgatgcgggagatgccgttgcggggggggagctccacgccgggaatgacgcgggcgaagatttctccgcatttggggccctggacggccaggcccacatattcgtcggaatggttttccaggaccacgtccgcgggcttgtgggcggagagccacgcgaagtcttcgtcaatcttggaggcgttcaccaccacgaagaaggtttccggctccatccggtacaggatgaggtcatcaatgactccggcccggtcattgagcatgatggagtattgcccctggccgatgtccagtttattgatgtcattggtcagcatggagttcagccatgcagccgctgcggcgccggccaccgtgaactggcccatgtgggagatgtcaaagatgccgcaggcttcgcgcacggctttgtgttcgtccaggatgccggtgtactgcaccggcatgttccagccggcgaagggaaccattctggctcccagttcaacgtgcttggctgccaaaggggtggatttgacgtcgggatcagtcatgaggcgatgtgaaggttatgagcaatctgctctctgcatcaggaaaagtcaatggaattccggtaaagctttgggctaaacattgaagcggaattcgaccacgtctccgtccttgacgacatattcctttccttcaatgcgcagcttgccgtgctcccgcgctccggccttgccgccgcaggataccaggtcgtcgtaatgcaccacttccgcagcgatgaagccgcgttcaaaatccgtgtggatgacgcccgccgcctggggggccttggccccggccgggatggtccaggcccgcgtttccttgactccggtggtgaggtaggtgcgcaggcccagaaggtggtacacggcgcggatgaggtcggaaacgccggaatcctgcacgcccagggattccaggaattcgcgggcttcttcatccgaaacgtcgatgagttcttcttcaatccgggcggagatgacaatggcctccgcgttgtggtgttccgccacgtattttttcacctgggagacgtaggggtgcgcgtccggattgttgatggcgtccgccagttcgtcttcattgacgttgcaggcaaagatgctttttttgtccgaaaggagctggaaggaatggagcagcttgcgttcgtcgtcatccagttgcgattcaaaggtgagggacggattgccctcattcaggtggggcagcagcttggtgatgagggccacctccgccttggcttccttgtctccgctgcgggccttgcgctcccgggaggaaagccttttgtccatggtggcgatgtccgccagaatgagctccgaattgatgatttcaatgtcgcgcagggggtccacggaaccaagctcgtggatgatgtcgtcattgtcaaagcagcgcaccacctgcacgatggcgtccacttcacggatattcgccaggaactggttgcccagtccggctccttccgaggcgcccttgaccaggccggcaatgtccacgaattcaatgagcgtggggatgattttttcagagccggacatgtcggaaagcacttgcaggcgggagtccggcaccgtgaccatgcccacgttcgggtcaatggtgcagaagggataattggccgcctgggccttgcgggtcctggtgaccgcgttgaagagggtggacttgccgacgttggggagacctacaatacctgcctgtaacataggcaggactgatagcggctcacgccgtgaaagtcaaataccaattgccgccgtgcatttatgcggcgtcacccagggcccatttgagcaggttttcagattccgcccagatgcgggacggatggcagccgagaacgacgacgatgacatggcggccgttgaagccggcggaggaaaccaggcagcggccggcggcgttcgtgtagccggttttcatgccggtgacccacgggtgctgggtgagcagcttgttggtgtttctcagcagaagcgtcttgccgttggcgcgggtgaaggcgtactggcgtttgcagatgatgttgcgcagttccggattgcggtagacgtaataggcgcagcgggccatgtcaatggcggtggagtactggtccgcggggagaccgttggggttgacgaagcgggagttgtacatgcccatctggcgcgccttggcgttcatcaactgggcgaaacggggaacggaccccgccgtatcgcgggccagggccacggctacgtcattgaagctgcggatcatcagggcattgagcagttcccggcgggaatagacttctccggcacggaagcccagcttggtgggatccgctttggtgtcggaaggctggataaccaccttcctgtccaggctgccgtgttcaaggacgaccatggccgtcacgagtttctgcgtgctggctacctggcggtgctggagtccgttgtgggagaaaagcacttttccggtgagggcgtccatgacgcaggcgctggcacagcggggcgtgcgcggggcgctcggcggaatggctaccggacgcgtgggaaagttggcggggcggggaagggcgttggctaccggctgggaaagctgcgggggaacaggcgttgccagggggatgtaatcacttgaatccccatacgattggcagctcgtggagctcaggcaaagggtgaatcctgcgagaagggcgaacaaacgcatgtcttgttgctacagtaagaagtttcattcatcaagcccaaactccgcatttgaaagggagttggacaaaaaaaggccgcgggttgtttgatccgcggccttttctctctattaactacctatggaaccaaaaaccaccctggacggattttgagttacttttcccacccgtcggatagatcttgtgaagggtgagactttatcccgcaaaaagatgttcaaaatatgtccgtaaacggttatttttttaagaaatatttctgcatgtttttgtgtttgcattaatataaacacgttatggggttttggccctgcatgtactgtctgttgcaggcatgagagttcttccgcaggccttgaagcgcgagggatcttcccttgttgacatatttaatttctggaataataactgttaggaggtagcttgacggctgttttagatgtttgagggtatttgttttgcatcatgagaagaaagttttttttgccggaagcagcccggaagcaaagaaaaaagtcattgcgcagcatagacgattatggttccttaccataaatttgaatcatcatgaaagtttccgtcctgtttttgtcactggtagcctcctgcatggcctgcgccgaagttcttccgttcaagacgccctcttttgataccaagagatgcgctgacagcgccaagtcctccgtgtccatggagcagaaggaaacgtgcgttgaagtgaagctgctggacggggagaacagcatggaggcaatgattcccttccgggacaagaacgattacagtaacctggccgtttttgaaaaggcatttgccaaggagaatatttcaaagaagcttgatattttgaagaaggtggaaccgaggctggtcaagaccattatccggggcaaggaggtgaaatgcccggtggtgccgctcgtttctccgatcaagggggaggacggcttgatgctggcgcttttcctggcgtcctatgaaaagatagatttcaaggcccagcaggaaggccgctttcagaagaaaagaaacccggacgacatcaagtttgtatatggagtgatttttgaagtttccgatcccgtgtccaagaagaagctggccgccccagtcaaatgggagcaggcggagacgatttccgcctggattgatgccgtgcgcaaggaggttaagcagtaggagctttttctgttcctttaaccgtgctgacgcgggctgccgccgtccgggggcgccctgcctactgttgaggcatttccggaaagggaggagaagtgtttagtgtcccttgtggttgatggaaaagtatccgcctgcatccggcgtgatttgccctgcaatttgcattctggacagaagcggcgtaatggcgcatgccggtttccccagtgaggcgcagagggtgtcaatggtattgaagcccatcctgacggcatggaggatttccttttcctccgcagtgggaggcagcggaggtgcagcggcggaaagggaggatggggaaaaaaggggtagaccctgttccggggcggtccatttcatgtcatgcaggatgtcggaggctccggcggccagcgtggctccgtcccggatgagggcgtggcagccgtcggaggaatgccggtcaaccgggccgggaatgcagaagacctcccgtccctgttcccctgccgtccgcgccgtgatcagagctccgctgcgtccggaggcttccactaccagcgtcgcgcggctccagccgctcacgatgcggttgcgcatgggaaaggtggtgcgggaggggggcagctccatcgggaattcggagactactgctccatggccgtccgcaatgcgctgcgccaggtttctgttttcccggggatacagcttgctgaggcccgctccgatgacggcgacggtgcgtccccccgcatccagggctcccgtatgggcctccgtatccacgccgcgcgccagtccggaaatgacggttaccccggcctccgccaagtcatgagagacggttttggcgcatagcctgccgtagtgggtggccatgcgtgaaccgacgacggcgatggagcgttcggaatcccccgcggtccaggatccccaggaataaaggacgatgggcgcgtccgtcagctcgcgcagggcggcgggataggaggcgtcaaagaccgtggtgaccgtggcccccgccttatccgccagttccagctcccggtacggattgacgatgctccgccaggatgagatgtggcgagccagctgtgccccgatgccgggaatatccatcagcatggaggccggagcttccagaaccagttccggagaggcgaatacctgcatgaggcgcatgaccctgacagggcccagccccggtatcaggttcagggttatggcggcttcccggggcgtcatgaataaggagtcagttcctggtaaacgtccagatgggcctgaatcatatcctccatcttgtaaggggagggtatgtgacggggcaggggagggggctgggcgtaccagcgggaaagcaggtcagccatggaggaagcgtcccccacggcgatgtttccttccggcaggaaggcgtccagttgttccttgactccgccgtgggcgtacccggcaacgggtctgcccagggcgagcgcctcaagggttgatttgccgaaggcctccgggcttttggtcagggaaagagtgacggaacaggtggaaatgatgtcccgcaggtcctggcggtggccggtccaggtgaaggcgtgggagacgccggcccgctcaatttcccggaggacttcgtttttatattcttcctttccctttttggtctctcctacgatgacggcgtgggccggaattccccgttccagaagctgtcttacaatgggaatcaggtccagctgccctttcaggcgcgtgatgcggcctggcaggcacagggtgaattttcccttgagctcgggataggacatatgccagcccgtgagccattcccgggaaggggagtagtccgggtggtgctggtccggggaaatggcattggggatgattctgatatggttctcgggagtggacggataatgggtgaggatgtagtcccggatgcagttggaaacggcaatcacccgttccccccggctcatgatggcggagtaccggttgacggagtaaaagccgtgcacgctggtgacgaggccgggcctgtcttccggcggcagttttttccatgccaggtagcctacccaggcgggaacgcgggaatgaagatgcaggatgtccggcctgacggcctggagcagggcgcggagggcgccgatgcggaagaaggtggcgaggctttttttgccgatcggcatcaggatgtggcgggagccttccttttccagccggggaaccaggcgtccgccgccggagacgacgatgttttccacgccccgggcggaaaggccgctgcccagttccatgacgacttgttccacgcctccggattccatggaggggacgagatgtactattttcataaggcgtggagttggggaaagaatctggtgaggatgtagtctgcggcgcggtccgcctccagaaggggggctccgggcgctgccaggcggaagccctgctttttccagtcccggtatccggtgaccaagccttccttttccagcatttccaggccggacaggatgcgggatttacggttgccgtggcggcgggggacagccaggacgcctacgggcgcccccgcgcccagcgcttcatataccatggagacgctgtcctggctgacccaggtggcggaggcgtgcgccagatgccgcgctacccaccccggctgcgtttcctccactggaacgacggtgatctccggaacggccgtctggattttctctgcaaagcccgtcggcgtccggcgcgaggtggtcagcacgatgttgccgggggtgttgatgctgatgtccgagagctggttgagcatggcttcgtcatcccagtcaaaatccttgctgggacctccgatgaggatcagggtgatgtccttcgggatggaggggtcaggcctcatggggtgaagcgctccatgggtgggaaagatgcccgtatccgtatagtcgcgcccggggcgcaagtcatggcggggaatgaggcagaggtcaaaaaaggtgcagggaagcgtgggcttcatgcagaggacagcccgggtcttgaaatgatggcgggcgcagatgagcgggatgtgcgtggcgtgtccggcggagatgaacaggtctggctgcggcgtgtcgctgccggagacgaccttccggattttccccagaagggaaagtccctgcaggtccaccgtttccacggccccccctgctttggcaatcagagcctgcgccagtcccagggactggttgagatggccctgtttcccatcgctcagaatccggatgttcatataggtctattatgaagcggcggcagggtgcaggcaatccaatttccaccggattgaagaaaattcttggtggaaggggcgctcttgtccatgatgcgggcgtgctgacgccggatcccgctgttattaaagattccctgtgcgccgtgtcccggcagcttgggttttccggctgccgggtggcccgtgcgggaaggagcccgcatgcggaaaaattgttccaatggctggaacggggctggcacgccgggatggaatggatggcgcgttctccggagcggagggcggaccctgcggaggtgctttccggctgccgttccgtcatctgcctgtcctatgactatgacagccccgccatgcgtccggagggggagggaagcatctgcctttacgcccacggaagggactaccacggaattctggaagagaagctggcggatttgcaggaactgctttccatttacggcggcgagcaaaagggatatgtggacgccggacccgtcatggaacgggaccacgcggaagcgtgcggcctgggatggcgcggaagaagcggcctgatcgttcgcaggaagggaggctcgcgctttttcatcgccaccctgctgaccacactggagctggagccggacgctccggtctcccacgggtgcggaagctgccggcgctgtgcggacctgtgcccgacgggcgcaatcatggaaaacggccaggtggatgccggacgctgcctttcctactggacgattgaacaccggggatccattccggaggaaatacgccccctggtagggacgcggctgtacgggtgcgacacctgcgtgacggtctgcccctggaacgggaagcccctgccggaggcggatgagcggttccgcatgtcccgcctgctggcctccattccgctgcgcgatctgcttgccctggatgccggcggctttgcggacctgttccggaattcccccctgaaaagaatcaagagggaggggctgctgcgcaacggctgcattgtgctggggaatgcgggaactccggatgacattgattttctgaaggcgctttccggggagtcccccctcgtggcggagcatgcttcctgggcggtggaacgcatcctgcgccgccacgggcggcatgcatgttcaagcggcgcaagagattaaaaatagaaaaaatgacgttttgctcttgtcaaaacctcaatttatggtatccatcttgccccaagcaatagctctgcgcgaggcagagaaaaataacagctagcaaatccaatccattatggcacgccttttcggtacagaaatacccaacgagaagcgcatcgaggcttcccttccgtatatttacggaatcgggcactcgacttctaagagaatcctggaacaagcaggcatcaatcccgacatccgtacgggacagcttaccgacgaacaactcacgaagattgttcaagtgatcaccactgacggaatcctgattgaaggtgaccttcgtcgtgaaaagcaatccattctcaagcgtctgacctccatcaactgctatcgcggtcagcgccaccgccgcggccttccggtccgtggccagcgtacccgcacgaatgcccgcacccgtaaaggcaagaagaagaccgttggcgcgcaggccaagaagaagtaatccggcaacctgaattttactatatagctttactatggctagcgaagaaatcaccaacgaaaccgccgaaaagcccgtggaagcggcagctcccgctcccgctgctgaaactccggccgccgctgtttccgctcctgaagaagtcaaaaagcccgaaccccgcaaggacatttttgcggaactcggtctgggcggcgatgatgacaagcccaaaatcctgaaggccaagggcagcaagaacgtttcctccggcgtggttcatgtttcctccacgttcaacaacaccgtcgtgaccgtcaccgaccagcgcggcaacgtgatcggctggtcctccgccggcaagatgggcttcaagggctcccgcaagagcacggcttacgccggccaggtggtttgccaggacgcctgccgccaggccatgggccacggtctgcgtgaagtggaagtgcgtgtgaagggaccgggttccggtcgtgaatccgccgtgcgtgccgtgcagacgatcggtattgaaatcacctccatcaaggacgtgacccccattccccacaacggctgccgtcccccgaaggcccgccgcgtctaattgaatccttttacctatagatcaaatatatcatggctcgttataccggtccccgcgataaagtgtcccgccgttttggcgttgctcttttcggttccaccaaggctcttgaaaagcgccccttcccccccggccagcatggcatgcgcgccggccgcaagaagaagtccgactacggcgtgatgcttgctgaaaagcagaagctgcgtttccaatacggtgtgcttgaaggccagttccgcaagtattatgcagaagccgcccgccgccgcggcattaccggcgacatcctgcttcagctccttgaactccgtctggacaatgttgtgtaccgtctcggtttcagcaacacccgcgccggcgcccgtcagctcgtttcccacggccatatcaccgtgaacggcaaaaagacgaacgttgcgtcctactcctgccgccctggcgatgtgatcgccgtcggtggaaaggcctcctcccagcagctggctacccgtttccttgacctgacccaggccactgtggttccggattggctggaatgcgaccgtgacaagctcacgggcaagattgctcgcgtaccttccaaggaagagattgctcccatcgtcaacgagcagctcatcgtggaattctactcccgttaatcttatttccttctggatttgcttcaaaaccccggttgccttttggcggccggggttttgggcgtttaagggaagaggatggaaagttgagagttgagagttgagagttgagagtataggatgggggtatgacggatgatttgagcggaaggggagtggccctttttgatatggacggaacgctgctgccctgggatacgcaatacgttttttcctgtttcgtgctgaggctccatccatggcggcgcctgctggtgctgcttttcctggcctgcattcctctttatgttctgaggatatgggatgaaaaccggatgaagagggcctatctcatttatttgtgggggctccccgcagaaacggtgcgggagtatggaaggaaattcggctctctggcacaggaatggatttatccggaactgaaggaacggctggaggaacaccggaagaagggggatctgtgcctcatggtttccgcctccccaaccttttacgcggaacctctgggtgagctgctgggatttgacggcgttctggggacggacgtgcttctggacggccgcatgccggcgatgccggaattgccgaacggcaacaacaagggacagatgaaagtggagcgcctgcgcgagcggaaggtgctgccggagcacggcgttctggataatgccgccgcctacagcgacagtggcgcggatatgcccatgctgctttcctgcgggcgaagggtcctggtgaatccttctccttccctgaaggaagacgaacgcctggccggggcggaatgcctgtatcctgcccggccatggagaggaaagcttggcaagatctggaagattgctctttttgtcatggggatggtaaatataaatgttagaaaatcaatgattagctaactgtgggggagaaaaggctttacatttgtgacggaaatgtttcactttccttaacaagggggaaaagatacttttctttccttgttagcaaatcaacaattaataccctaaccaagtaatagtcatgcaaaccaagaacatcatcagtgttgcggcagctgtggcatcctttgccggcgctgctcttgcgggcactcccgtcaagattgttgctccgactccggttcccactcccgtggcgactgtcagcccgctgtccggcgatatctacgccggttatgcctccaattacaccagccgcggcatcgtggcttcccacgccttggtgggaggggatagcgttatccctgccggtgtaaatctgaattacaagctgagcgacgccaactccattgtgggtgccgcttcctacacctccctgacctccggtcacgagctgcttggcatgaaagatattgctttccacaatgaaaccaatttcaaccttggctggaagaaccaggacggtttgctgaagaacctgtccaccaccctcggctggaatctgattcatggcggtctgctcggcaactttgccaagtatgattacagcaacctccttgcaaacggcgtcgttggccagcgtcatgcccactccgtggctcaggaattctatctgaacctgaactatgacctgtgcagcaactggttcgccggtgtgaccactagctatggcttccagggaatgaccggatggtggttccagccgtatgtgggctggaaggcttccatctgccccgccacggacatcgtgatcacgggcggcatgtctgccactgccggctacttcgacagcaagtccgctttcatgtccaacggcgcgcaagcctggtgggtgaaggctgaactgcctgtcaagctgggcgtgaagaatctggccgtggttcccttcgtcagcttcaactgggccggcaacggcgccttgaaggctaacaagggcgtggacgcaggttccaagccttacaagaacttcggcgtggtggctggcgccaacctcgtctattccttctaagccgtccggcttacgattgaatcatgtttcaagagcggcggagcaatccgccgctctttttctttcatgttccggatggaggaaggagaaattgccgattaaggcggggactaagatccggccattgttcctgttccggccggtgatggcttaggaaaagccgtcacggatatggcagctgctgcactggctggaaaatttggggtggcggcagggccggatttttttattccttgcaggatgagcggcttgcggaggaattgactttcctgggtaaaggagaattgctccgctccttttttgcttgttgccagaggcagtatttttattcagaatgccgcggaacaggagttccaagtttatgagtttttcctttttttctgctcttggggcggttctggccgtttccatttcaaattccctggcggagtcacgcattccggatgttccttccgatccgcctctgagacccgtgagcggcagcttgaaggcgggctattccacgaattacgaattccgcggcctgattcccggcggctgtaatcccacggcccccttgcgtctggactggagaagcgacctgaatgaccggtattccttggttctggcgttgaaggaggaaattttcctggggcatccggcggttgacttggagaatgagacaatggctgatcttgggcttcaaaggaagttcgggaaggccacttacgccgcattatccttccgtgcgaatgacggcggtttggcggggtttgcctccgaacatttgttcggcaacggtgggacaacgtatgaaacggcgctgattctgcgccatgatctgggcttcctgcccggtttttatgcgcagggaagcgccgcttattccttttacggcattacgggctggtggtttgacatgtgcaccgggtcggatttccggatgacggagaacctttacatgggtttcaagttcggcgcggtgctgagttcctcctactggccttccggcagcaacggctggcagtccctgtacgtcagggtgacggcgaattaccgtttgttcgggaatatttttgtggagccgtttgtggggctgcactggctcggcaagggagcccacggggtgaaccgggtgtatgggagaacgctggtgaagggcaatagctgggtgacgggcgtcagcctggtttatagcttctgaccagttggaggtgtttccccctcctgcgggaagaggtccgcacgcatgcggatcatgtcaatgcactgcacgccgttgtcccagacgggttccgggtagttgtccgtaaagtggtttttgacgacgcctgaaatccggaagccacagctttcatacagggccattgggcccggggaggcatcgcacgttcccagttccgcatatcttgcccccttgttcctgatgatgtgcagggcgtgcagcaccagagcggttccgcaaccgtgccttctgtattcaggggctacggaacagttcatgatttcccatgtgtcttcccccgtttgccggatgacgatagctccggcggcagctccgcggctccgtgcgacgtaaagttcgccgtgggccagatggtccgctacctgccgttcgtccggatcggcatccagcagaagttccctgaggggagggggcggaggccacacggctgtttcctgcgccacatggaaggcaggggccatcattccgcgcgcatgaagatgatggagtccgccagcagttccccttgcaggctgtccccctggatgacgacgggctggccggaggtgataagccctttttccttcagcaggttcagagcggtggagatcatgcgggccgggtctttcaggaagggggattcaaaggcggtcacgtcgcgtgccagcgcgagctgccggacgacaacggggtcattgctgaaggcgaagatgggggcccgttccggcctgaggacggctgcctgcgtggcggccaggccgcggcgggtgaagatgaccatgcaggcgttttccacggagtccgccagggagatggctgccttggtggccttctgcctgtctccgttcaggatggcggaggcggcaaagttaaggttgccggagcgctccatgcggtgcgcgatggagtccaggacctccacgcagcgcacgggataatggcctacggaggtttctccggagagcatgacggcgtccgcctgttcaaagatggcgttggaaacgtctgtgacttccgcacgggtgggggtgggctgcgtgatcatggattccagcatgtgcgtggcgacgatgcagcggcgccccagcctgtggcagtggcgaataatgcggcgctggatgatgggaagttcctcaatgctgacttcaatgcccagatcgccgcgcgcgaccatgatgacgtctgcggccaggatgatgtcgtcaatgtggcggatggcctgctggtcctcgattttggcgacaatctgggcccttcctccaaggttgtcgatatgctcccggagctgggcgatgtgggcggcgtcccggacgaaggacatagctacgtagtccgtctcgcattccacggctacggccaggtccgccaggtctttttccgtcagggcggggagccgcagggccacgccggggaggttgatgtggcggcgggagccgaatactccttccgtgagcaccttgcagatgagcctgtccgggcgcacttcctcaatgcgcatgaggatccctccgttgtccaccaccatcgtatggcctacctggacgtcctgcaggagcccgtcatagttcaccgtggtggagaaggggagttccggcttggccgtgctcaggcggatttccagcgtgtccccttttttcagatgatagggttcgggcaggtccccggtgcggatggatggcccctggaggtcaaagagaatggctatgttcgcctgcagctccgcggctttccggcggatgcggaagacgacttcccggacccagtcgtgtttggagtggctcatgttgagccggaaaacgttggctccggcttcaataagctggcccagcatgtcggaagtgtctgttgctggtccaatggtgcagatgattttggtggcgcggggccgggaaggtgtgctcatggtctttgtcagtgcccatactgtatcttacgggacgttcaaatgaagttttttgtggtacatggcaggattgttgcatgtcacggagcggatgcgggagcatactggcggcatgaagcagatcagggttgaattgatcaacaccgggacggaaattttactggggagcattgtgaatacgaatgccgcgtggctgggcaacaggctgtttgaggccggattccgcgtggagagggagaccgtggttcccgatggctatgccattaacgaggccatgagggagagcgcccggcgggcggatatcgtgattgtgagcggaggcctgggaccgacgagcgacgatgtgaccagagaagccctgtgcgacgtgtgcggcgtggacatgcaccgtgatgagcaggtggcggagaggttgaagagctattttgaacgcagggggatttccattgcggaatgcaatttcaaacaggccatggttccggacggcgccgcggtgctggagaattccaacggcacggcgcccggcctggtgatgcctgccagcggttcccttcccatgttcatcctgctgcccggacctccgtcggagttgaaaccgatggtggagcagtcagtgatgccgcttctggaagatctggcggatgaggatattccgcatctgcgcgttttccggctggtaggaatcggggagagcgaccttcaggagctggtggatgattccctgcaccaggtggagggactggaagtggcgtattgcgcgcgcatcggagaggtggatgtgcgcctggtgggcagtgaagtggcgctgaaacagggggaggcgcgcctgcgcatcctggcaggagcgtatgtgctgactcccgcgggagtatccctggagaaggcggtggtgctccatctggcggaacaggggttgaaggtggcgacggcggagagctgcaccggcggcctgattgccaagaggattacggatgtgccgggttcctccggcgtttttgagttcggctgggtgacttacgccgaccgggcaaagacgaagatgctgggggtgccggaggatatcctgaagcttcacggagcggtaagcgaacccgtggtgaaagcgatggcggaaggagccctggaccgttccggtgccgatgtggcggttgccgtcagcggcattgcggggccgggaggcggcacgccggaaaaacctgtgggtaccgtatggctcgcctgggctttccgggggggagagacgcggacggagatgatgctttatccgagggaccgagggtctttccggcagatggtttcccagaaggccctggcggggcttctggacgccagaagaagggagcaggttacggaatgaggaaccacacagggagcactccggcttcatgtagcccgctgatgaattcaaagatgccgatgaaccagatgaaccacagcgcgtccacgatgttgtgcgtgaaggtggcaggattaacggagtaggttgcgggcggcggcttcagccgcgatagggagggaatgaaggaggggacgctccggcagtagttccggtaggcgtctccgaagagtgagatgagccgttcctgttccttcctgatgacggacgggtagtaaatgccgaaggccaatgccgtcagcagggggaccgtgaaggtttccgtggcgcacgctacgcctatgccgccgatgaagctgaagaagtaaagcgggttgcggcacatggagtacggcccttcaatgacaaggacgttgtttttataaccagcaatgtaaagggagcaccagatgcgcccgaaggcgcctatgccggccatgaaacaggccaggagcatgaggctttcttctatgagcggggatatttcccaccgggattccccaaagagcagggcgcagccgatagccaggccgaagaggagtgagatgagtgtgcggaagcgctcgttgagtgattttgcgtgagcttgcataatgctgaataaagggtaatggaaagatgttacggcctccggcaatggcgtgaagatgttttccgtgacgtttccgtcacccgcccggcgaatgcaaaagaggctgtacgcattagcgtacagcctcttgaagaaaaaatgggattccggaaatcaggcgcgcctgcggcgcagcatcagagctgccagccccagcaggctgagggtagccgtggcgggttccggcacggcgcccgctactacgtattgcaccttgacgtctccgttttccgtgtagaggtagtattggccctgatagtcagcggcatttccttccatgaggccggaggccttggtcagcgcgctgccgtcttcagcggtaaagtcccccagggagatggaaccgccgtcaaaaccggcggaggtgaccagcgtgcgggtaacgaactggaattctcccacagtcaggtccgtggatgtggtggccagcagtccggagacggagaagctggacgcgccccagattttctggttgacgttcatgatgcctccaataccgaagacaagccgtgcgccattgccgccgggatcaatgccgcagacggtgaggttaagggttccgtcaagggtgatgtcactgcttttgaagtccacttgcccgaggttgagggtggaaccggagccgaccgttacattccccgtatagcgggtgccgccgacggtaacgttgctgttgcccgtaacggtgatgccgccgccgtcggaggtgtccaccatggcgccgttgacgttgacggttccggcattgttgaagatgacatccgggccctggccgttgccgcggctgggaatgccgttgctccagttgcccgcgttgcccagttcataggtgttgccttccgtagggccggccccaccggtccattccgtgaccatgctggcggcattggcgcaaacgcacaatccgcagagcatggcggcgatagataaggtttttttcatattaaaacagaaatgacttgataagtaagcccagaagagacgctggcgctacaatgaggctaccggatttacaatccgtcacggtctgaaaccggagaaatgtccatctccttacagggagtaccgcataccttgcggcaattgaaatacgtgtgcccgtcaggacgtaccggcttccaggaaagagagttcgctaacgctccctttcaaattcaaatgccgcagaagcctgcggcattcctcgccccagtccgacagctcccgacgggtccccatttcatataaacagctcctcataggcggaggggcgtcatcgcaagttcttttcccttagaatcacagcttgactccggattgtaaatccgcagaaatttgaagcgcggaagggattttattcgttttcctggtcgtgttcatccgcttcacgggtggagaagcgcatgagttccgcttcaaagtggagcggcacgtccccggtggggccgttgcggtttttagccaggtgcaggttggcccgtccggccatctgctggcgtttttcctcatcttccgcatagtaggcggagcggtagagcagcccgatcatgtcggcatcctgttcgatggagccggattcacgcaggtcggagatgcggggcacgcccaggctggcgcccgtacggctttccggtccgcggttgagctgggccaggacgatgacgggcactttgagttccttcgccagggccttgaggccggcggagatttccgccacttctcgttcgcggctgttggcggcctgcttggagtgggagcgcatgagctggaggtagtccacgccgatggcggccaggccgccctggtcccgcatgacgcggcgcgccttggcccggagttcgttgatggagatggcagccgtgtcgtcaatgacaagctgggaggcacccacttccttgaccgcctgcttgaagtgcttcatttcaagctgggtgaggttgcccctcttgatgatttcccggctgcggaccccggagcgggcgaagagaaggcgttccacgatctggaccgcgggcatttcacaggagaagagcagggtgggctttttttcattcagcgcaatgtgctcgacgatgttgagcaggaaggaggttttacccatggagggacgggcggcgatgatgaacatgtcccccggcttgaggccgttgctttttttgtccagttcttcaaaacccgtggtcagcccctggatctgtcccttgctggcaatgaatttttcaaagttggtgacggcctgcttgaggatgcttgccaggctttgttcgtccttggcgctgttgtagcgttcccgtatctggaagatgtgggtttccacggagtccagcagttccgccacgtcgtccggattgtcaaaggcctgggtggtggaccgggtggcgatgtcaatgatggagcggagaatgaatttgtccttcaggacgttgaggtagtgctcaaagtaggctccggtggtggtgaaggtgtagatttccgccaggcccgcgcttccgcccaccgcttccaattggtgcatgtcttccagggcctgggtgatggaaacgatgtcgatgggctcgtttttattgtaacgggtctggaagaggcgccagagcagtttatgtgcgggcaggtagaagtagtcctccgtcatgccgatggtcacgcactggcccacgtaggtggcggggtccatggccatgagggccagcacgcctttttccgggccaggagcctgcggaatgtccctgaggtccagggccggggctttgcggggggccttggtcagttccagcgggacggcggcggtgatggtttccgtagtttccatgatgcggcggcgggatgggtggcatccggctggaaaggaatagcacaacggagggcggcgggcaataggcaacgtcgtaaattcagaaaagcctccttccgtcagagggacgttccaccgttgttttcccgttctttcctcagtctcaactggccgcaggcggcgttgatgtcatggcctttttcataccgcatggtaacggggatgcgcgccttgtggacggcgtcccggaaggcgcggcagcggctctccgaagggcgttcccatgggagcccctccacagtgttgtatggaatgaggttgaccttggcatgcaggcgcttggcgatccggacgagatgggatgcgtcgttcagggagtcgttcacgtcccggatgaggatgtattccagcgtgggcatctggttcctgtccttcccccattcctccaacgcgggaatgagctgggagaggggccattttttgttgactggcatgatctggtcgcgcacctcgtccgtggctccgtgcagggaaacggccagacggatttgcctgggataggcggccagttttttcaggccgggaacgaagcctgacgtggagatggtgatgtggcgcgcgcctatttccagcccgcggtgggaggtgatgatttccagggcgtcctccaggttgtcgaagttggagagcggttcccccatgcccatgaagacgaggttgttgacccgttttccggcgatggcttccgcagagaggatttgcccgatgatttccccggtcgtgaggttgcgtttgaggcccagcaggccggaggcgcagaatttgcagccgaaggcgcagcccacctgggaggaaacgcagagggtgatgcggtccgcctgttccccgttttccgcagcggcggcggggatgatgacggattccaccagactgccgtcttccattctggtcaggaatttccgtgtggtgtctgcagagccgtggacttccacgatttccggtgtgtggaaacggaagttttccgacagcaggtttctgagcgccgggggaaggttggtcatcgcgtcaaaggaggtgacgcgtttgcgccatacccagtccaggacctgctgggcacggaatttggtgtggccgcgttccgtcaggaaggcgagcagcttttcctccgtctgggcagtaatgaggggaagagagggcatggggttgaacggacccgttacagcagggaatccacgtagcggtcccggttgaagggttcaaagtcttcagctccttccccggttcccagaaaggcaggggagatgtgcatttcatccatgatggctacggccacgccgccttttccggagccatccatcttggtgataatgacggagtccaggggagtggccttgtggaattccctggcctgggccagggcgttcgcgcccgtggtggcgtccaccaccagcagggtgcggtggggggccgctgcatcctgcttggcgagggtgcggcggattttggagagttcctccataaggttgtggcgcgtgtgcaggcgccccgcggtatcgcagataaggtattggaagccttcccggatggcctgagtgtgagcctcatagcaaacggaggccgggtcctggttgggcgctcccttgtagatgggaatttccagcttgtccgcccagctctggagctgttccacggcggcggcacggaaggtgtccgccgcggccaggagaacgcgggagccctgtttttgcagcaggtggcccagtttggcggcggaggtggtttttcccgtgccgttgacgcctacgaccagaatgaccagcggctttccctccggaggagcgggcagggacggagcggtagcaggaaaggcctggcggaggacttcacgggtggcttccaccaggttttccgcatccagtcccttgctttccctcagttggtccgcaatgttcatggcgcgccggatgccgatgtccgcagtaaccaggtccgcttccagttcatcccagtctatccgggaaccgcgggagaatttggtgaagagttttttaaagaatccagccatggtacagggtagtggttacgccgggcgttccgtttttgagatgccggccagcacgccgttgacgaagcggggggattccgcggaggagaagcgttccgccaggcggatggcttccgagatgacgatgggggcggccaggtctttgcggtgaaggagttcgtaggcgcccaggcgcaggatggcgcggtcaatggcgctgacgcgttccggagagtagttttccagggtgccgttgatggcggcgtccagttcgtcccggcggcgcagaatgtcttcccccagggctttggcttcacggtagagttcatccgcatcctttccggcttccaccacttttttcatttccgccagggaggggcggccgtccgggtggatgaggcagttgatgcggtcgttgatttcctggagcttgttgcaggaggaaacaaggggagcccagatgccgttgtaggcagggaagtccttgagggcatccagcaggcggcggcgcatctgcatcagggtggtgttgagttcctgcgcggcgtcacaggcggcggaaagcgcgcctttgtcattggaggggtcttcgtacagggtttttttcagttggagcagggaggcgttgaattccccttccttgaccagcaggtcgtggagcaggtcacggacgggcagggtgagggggtcgtgctgaagcttgtccgccgtttcccgcgcacgggtgacgaagaggcgcagcttgtccggatagtcccgggtcaggtggccggagacggccttggccctgagcttgcagtagtccccgcggaagggttccatcaggatgtcccagatgccttcgtcctgttcctgctcctcttccggagtctgggaggtggcgtagaggtattggagggctgcttgtctgatttggttgcgtgagagcatggcggtagagaagagagagggaggatgtgccttattgccgggagagggagttgaggaagagttccgccatgcgggctgcggtgcgggccgcttcccggccgcggttgagctgggaggcgatgcagcgggcaaaggcctgcttttcatcgttcaggagaaggacttcatgaatgacgggcgtggtgaattccagcgcgagccgcatcagggcctgcgtgatggtggacccgatgaggtccgcgtggtccgtgctgccgcgcaggatgactcccagggccaccacggcgtccgggcgtttttccggagagcgggagaggacggatttgatggtgaccgggatttcaaaggctcccggtacgcggatgatttccagccggactgcggggagcacggcttccagttcttccgagcagttgtctaccagggcctgggtgtattgctcattgtattccgaggcgacgatgcagattttggcgcgcgtgcccgtggcgcgctggcggcgtggaagttccgtggacatggagggatgggatggagtgggagtttacaggatgtggcccagcttgcattttttggtagccaggtatttgctgttttgttcgttgggggggatgacgaggggaacctgttccgtgattttaatgccgaagccttccagccccacgattttccgggggttgttggtgagcaggcgcaattggtccgctcccaggtcatgcagaatctgggcgccgatgccgtagtcgcgaaggtcgtccgggtagccgagcttgaggttggcttccacagtgtccagcccctgttcctggagcttgtaggccttgagttttgccgccaggccgatgccgcggccttcctggcgcaggtagaggagcacgccgccttcctgcgcaatgcggcgcatggcggtgtggagctggctgccgcagtcgcaccggcgggagccgaagacgtcccccgtaaggcattcgctgtgcacgcgcaccagcgtgggcttgtccggggagatttccccgtgcaccagggccaggtgaagggctccgtccagatgggattcatagaggtggcaaatgaagtcgccgtagtccgtgggcatcttgacggtttccaccaggcgtatctgcttttccttggcccggcggtattcgataagctgggccacggtgcaggctttcaggccatgttttttctggaagccgcccaggtcgccggtgcgggccatggtgccgtcttccttcatgatttcacagcagacgccggcaggctggaggcccgccatgcgcacgaggtcgatggtggcttccgtatggccggcgcggcgcagcaccccgccgggaacggctcggagagggaaggtatggcctggctgcacaaagtcattgacggtggccttggggtccgccagcgtgcggatggtcaaggcgcgttccgcggcgctgatgcccgtggtgatgtcatgggccgcatcaacggagacggtgaaggcggtggacatgttttcccggttgacggaggtcatgagcgggagctggagggcgtccgcccgttccggggaaagcggggcgcagacgaggcccctggcgtgggtgaccatgaagttgatggcttccgtcgtagcgaattcggcggcaatgatgaggtccgcctcgttttcacggccggggtcgtccgtaacgatgatcatccgtccctgccgtatttcttccacggcttcgtcaacggtgcagaattgaagttggttatccataaaggggatgaaaggagaggaggttatttttgctttttggcccaggagtccttaagggccacggtgcggttgaagacggcgcgcttgcccggtacatggtccctgcggtccgccacaaagtagccgaggcgttcaaactggcagcggaattcaggttccgcttcagccagggatggttccagcttggcgttcgtgatgacggtcagggagccgggattcatgacggagaggaagccttcttccgcggcatccgggttttcttccgtgaagaggcggtcgtagatgcggatttcaccgtccacggcgtccctggtgcttacccagtggatggccgcccggcactggattccttccggagggttggagccgatggtgccggggatatgctcgcagaagatttccgtgatgtttccgtccgcatcctgccggtagtccgtacaggtgatgcagtagccgccgcggaggcgcaccgtgcggccgggagccagtcggaagtatttcttgggcgggtccagcatgaagtcgtcccgttcaatccagacttcccgggtgatgggaagacggcgggttccttcctccggtttttccggattgttcagcacttccgccatttcctccgcgccttccggcagagtggtgatggttaccttgaggggattgagcacggccatgcggcgcggagcgttggcgttcaggtcttcccttacgctgtattccagcagggccacgtccgtgaagccgttgaatttggtgatgcctattgtctggcagaagttgcggatggcggcgggcgtgtagccgcggcggcgcatgccggagacggtgggcatccggggatcgtcccagccgctgacgtgcccttcctgcaccagctggagcagcttgcgcttgctcatgacggtgtaggtgaggttgaggcgggcgaattccgtctggcgcgggcgtgccggcacggggcagttttcaatcacccagtcgtacaggggacggtggttttcaaattccagcgtgcagagggagtgggtgatgtgctcgtaggcatcctccagcgggtgggcgaagtcgtacatgggatagatgcaccatgtgccgcccgtgttgtggtgttccgcgaacatgatgcggtacagcacggggtccctcatgttcatgttgctggaggccatgtctattttggcgcgcagaatggcttttccttccgggatttccccgtttttcatggcctgaaagcgtgccaggttttcttccacggaacggttccggtagggggattcctggccgggcatgttcacgttgccgcgctgggcgcgtatttcctccaccgtctgttcgtccacgtaggccagtcccttgttgatgagggcgacggcgcattcgtaaaagaaatcgaacatgttgctggcaaaaaagagattgtccccccagtcgaagcccagccagcggatgtcttcctggatgctgtccacatattcctggtcttccttgctggggttggtgtcgtcaaagcgcaggtggcagcgcgcgcccggaaattcctgggcgataccgaaattgaggcagatggatttggcatgtccgatatggaggtaaccattgggttccggggggaagcgggttaccggtgcctgatgcttgccggaggcaaggtcatcagaaatcatatcgcggatgaaatctcggcgttcggcaggctgcaatgacatggcgaaaattctactaccaaatttccttctctgcaagcgtgttcactcggaatgacatggggaggaatacggcggataaagagagttttttatcttttcccggaaggccccggttataaaatttaaataatttatatataggaatgtttgggaatgtggatttctgatgaaggttggctaaaaaatccccagtcttttactaggaaaaaatgttgtcggccgcttcgtcttgtgttcaaggttctgaggaatggttgtcagttatagaatattttaaatgtaagatacctaggttaaatttaaagttcaggaaaaaagaggtggaacgggatggttagggaaagcggctgagctggagttcaatgggacatccttgaaaatttatgcagaataaccggcaaaaggaaagtttgaaagacaggtattgcaaaagaatcaaaaacgtgcatattgaactccggtgaatctgaattgtccacagtgcaaacgacatatcaatgttccttccgctgcggagggttccatggtgaattgcagcaaatgcggccatgagtttctttgcgacagggaaaagctgatccccaagaagccttttgccagggcgaagaaggccgttaccgtgcatacccccaaagaccgccgggaggccattcagagcgccttgatggaaacggggctgattcaactgatgtgcctttgcgcctccctggtcatcgccgccggctgcgtctggcttttttacaatgcctcttccgagatggacgggacctttttcctttccatgctgcagcagcctcagcagaaggcgttcgccctgtttttcgcctgtcttgcggggggcttgatggcctgcgccggacgcaggcacaagattgttttcattttgctgggctttctggtggcggggggcattgcctccctgcctttcgtgtatccggtcaaactgaatccctccctgctcggcgggaaggaagcggtcgcccaggctgaggaggaggaaggcgtctccggctttaccagcatgagcctggaacaactggccgaacagaacgcttccgttcagaattacggggaaggggatttgaagcccctgtttgccgccattgaccggaaagaggcccagggtgttctgggcgtgtgggtggtcggggtgaatgcggccaaccgggacatggtgaaggcgtatttgaagaggatggcccagtctgaggacgagccgattttttatgaccgcaaaggcacaggcggcggcttgttcgttattactcctactcccatcacatttaaggagtttgtggacgtggcggccaagatggggaacgtgactttgcaggacaaggagcgtttctttgtggaagtggttctgaaccgggacaagtttgaagcgcgcccggcttccgccgcgttgcaggatgaacgccaccagtatttcgtactggccaatttgaaggaattgtcctgtctggacatccggcgcgtgattgccgcggcaaagcgcctggcttccgtgaagccggacaagatgcgccatgaagtttccgccaagctggtggagcttctccgggagccgtgggggcgtgatgcggagtatgtgaccgctttggcttccgccctcgtcgtgtgggcggagccggataacgcggaggcgcagcgcgtggtttactatgtggctacggagttgaagaaggcggactgcgagattcctgcctctctggtcaggtttttgctgcacggtccggagaagaagagctttgcgctgcttctggatgaatggaaaaaggatccccagaagtgggaggacgagtgcaaggccgtcggtcccaccggggaagccgacattatccggctgatgaacgagtcggacgattttgtgctgaaacgttccgccgcccgtattcttggggaaatcggttcggaggcttccctgtccgcgctcaaggctttcacccatgacgccgacaacgaattgcgcctgtgcgcggagctgtccgtaaacctgattgaaaagcggctggggatagattcttccgcgaagaacccccagtagggacggcatccgtttccggaagagggccggatggacagggcgggaggttttttatgcccggcccgaatgggacgcgtcgcaccgctcttttttcagctgaatggttcacggtgccggagggaaggctcccgcgtttttttcttttgcggctgttttttcatgaagatgcggggaaaatggcaggaggtgtttttggagtcattttaaacgaccttcctttcctgtacggcttcctagttgtttcttttgtgatatttttaccatttgggcgcatttgaggggaggaaagttgtttttgtcccggaagcgtctcttttttggttgcggagaaaagccaatttactagaatgcaacgaccatgacagaccaagaaaacatgaaggccgccgttccggatgcggccaggcgatacatgcgctacctcctcatcatggccggtttgggcggcctgctctacggtgtggacgtcggcgtgattgctgcggcgctcccctacattgagcagacggctggtttcaatccctcccagctttcccaggtggtggcggccgtgctgttcggcagcgtgctttcttccctgtttgccgggtatctggcggacaagttgggacgcaaggcgctgattaccgtagccgccgccctgttcacggtgagtattcccgtgatctgcctgtcccaggaagtgttcggcatcatgctgctgggccgtattctccagggcgccagcgccggtattgtaggcgtggtggttcccctgtacctggctgagtgtttgagcgcggaatcccgtggcaaagggaccgggatgttccagttcctgctgacggtgggcctcgtgttcgccgccgtagtcggtctgcttgccgccagctatgtgggcggcgtggaaaattccggcgcgagcgaggaaacgctgacttccgccaagatttttgcgtggcaggccattttctgggtttgcgccgttcccggccttttcctgtttttcggttccttccgtttgagcgaatccccccgctacctgttccgccgcggccgcaaggatgaagccatggccgtgctggtgcgcagttatggagatgtgcgcgccaaggaggtgtttgatgaaatggtccacattgaagaggaagagaaacagaaggctgaagagcttaagaagcagagttcttccggtgaatcccttcttcagcgcaagtatgtgtatccctttgttctggcggtcctcgtcctggcgtttacgcaggccacgggtatcaactccgtgctgaattactccgtgaaggtgttccagcaggcgggcctggaaggcaccaccgccaactgggcggacttcaccatcaaggtggtgaactgcttgatgaccatcgtcgccatgatcctggtggaccgcaagggccgcaagttcctgctcaagatcggcactgccggcattgtggtgggtctgctcggcaccgggttcctgtttaataatgtggaaaaagcccgcaaggacgtgaccacggacgtggccgccctgctggccgcccagagcccttccgtccagaaggagtttgaccagggcaaggacgtaggctccatccgcacgctgcagctggaacgcacgcccgattcccccttcgtcaagaacctgcttgccaagaacggcatgggcgacaaggacatcaacaggatgcagctcatcatcacctatgaccagccggaagccaatcccgcctggtaccagttcctgatgggttcttccacccagctttccgtggtggaattttccgagctgaccaaggatgccaaggatatcaagaaggaagaggacaaggcttccctggccgtgatcaaggccgttccggattccaccaacaagatggtggtgaacggcaaggacggttatgccatgaagcccgtttccatcctgaaggcggaactgggcgagaagccggatacctccatgggctggggcgtgaccgccttcttcatcatcttcatcgcgttttatgccaccggccccggcgtgtgcgtctggctggccctgtccgaactgatgcccgcccgcatccgttccaacggcatggcgattgcgctgctgatcaaccagcttgtttccacgatcattgccggttccttccttccgtgggtgggaagctgcggctattctggcgtgttctttacgctgggcggcattacggtgctgtacttcattacggtgaccttcttcctgcctgaaaccaagggccgttccctggaggaaatcgaaggctacttcacaacaggcaagatgccggaagatctcaagatgatcggtgaaggcattgaagcggaagaataatcttccctcctgtggttttcaaagccgcctccccgtccgggggggcggctttttcatgttccgccagaggaaaatgtttgctccatggctccggaaacctggctgttccgggcttccggcgtttccggaaggagcatgccgggcgtgtttaaagaccggaagaggcggcttgcgtaaggtctcttttgtaccggagaggtccggggatgaatcctggaacgggcaggccaaggctctgctgcggctcgcttgaaagacccgtggcggacgggaacgggcagatccctttttccgctttcactggaaaggaagatggcgttactcggtacgcggtgcttttttctgtttggcctgccagtctttaatggcttccgcaatggggggatacccgtttttcatgtggaagtcataggcggtttggccgtcatcgttgcgaagggcgggattggcgccgttgtccatgaggcaaacggctatctccggagagttgcaggccatcagcggcgtcaggccgtccacgtccggctggttggggtccgctcccgccttgatgagaagttcaatgagggggatgaggcgttccgctggtttttccttggtgcagaccagatgcaggggggactgcttgctttcaaagaagcgttcgttgacgtcgcagcctgccttgatgagccgttcgtaaatggcaggggaaaggctgaggaagccgactccgcgcgcctgggcgtttaacctgcgcttgaggtccggagaaccggcatccagcagggccagggctattttttcctgtcctggatcagagtcattgagggcggcggagtacatgaacggggtgacgccccacggtcccggctggtccgggtcggccccgtgcttgagcagggactgcaccagcggcagcctgtcttccgccgtggagttcatgtaaaggcccgagaggcaggcccaggtgaggggggtgtctcccggttccttagtgccgtcatgcatgaagatggattgggcgttgacgggagcgcccgcttctatcatccggatggccagttgattcaatcccagggcaatgcagaggtgcaggggcgtgttgcggtccggagcctgaagcatgaggttgccagtctcccggaattgctccagcatccggtagcactggaggatggagtggaattcctgttgagcctctccggcgaacatgatttccaggggccaggagtcgtgcaggaagcggagggtaagtcccagcagcttttcatttgccgcctggatttcctgtttttccgcttccgtgagctggatcgtcctttcctccgcatccgccaggggggcggctgcgacggctgctgcggacagaagcagcatggaccctgtcatttgtctcatggcatccttataggggaaggaaagtggcctgtcacttcaaataaggggcattatcccagtttggagaggctgacatggactgcttccaccgtacggtcaatgtcttcttccgtatgggccgtagagatgaagcccgtttcatacggggagggggcaaagtagacgccctgttccagcatgttccagaagaagggtttgaagagttccttggaggctttttgcgcggagtccaggtcatagacttcctgctccgtgaagaagaggcagaacatggagcctgcgcggtggaaggtgtagttcctgccgtgcttccggatggcctcgcggatgccttcttccagacgcgcgccgagctgttccaggcggtcgtaggcgtttccgtccaggagctcccggagctgggcaaggcccgccgccatggcgacggggttgccggagagggtgcccgcctggtacacggggccgatcggggagaggcagtccatgatttccgcacggcctccaaaggcccccacggggaggccgccgccgatgaccttccccatgcaggtgaggtccggcgtgatgccgtgaagctgctgcacgccgccgggcgcgacgcggaagcccgtcatgacttcgtcaaagatgagcagggaatcgtgccggagcgtgatttcccgcagaaaatggagaaaatcgttctgcgggaagtaaagccctgcgttggccgggaagggctccaggatgacggcggcgatgtcgctcccatggagctcaaaggcttttttcaccgcttcccggtcgttgtagggcaccgtaatggtgagctgggtcatttccctgggtacgcctgcgctgtccggttctccgaaggtgagcgccccggagcccgccgccaccagcagggagtccacatggccgtggtagcagccgatgaatttgatgattttgcggcgtccggtgtagccgcgcgccagcctgatggcggacatggtcgcttccgttccggagttgaccatgcgcactttttccacggagggcaccatgcccgtaatcatttccgccatgtccacctccgccggcgcggggatgccgtagcccagccccctgtccacggcggcatggacggcgttcagaacggtctgcggagcatggcccagaatggccgggccccaggtgccgatgtagtcaatgagctggcgtccgtccgcgtcagtgatgtaggctcccttggcggattggacaaagaaagggtcgccgtccacgttgcggaaggctctgacgggggagttgacgccgccggggatgacggcgcgcgcgcgggagaagagctgggcggattgattcatgtgctgagggaagcaaaaagggcaaaccttgagaaagggttgccctcattgaaatgggttctattcccgaaccaatactgatttaagcttcaggagcggaagcgggagcttcagcggtttcgggagcggcttcttcgctcttgttgctgtaacgccattttaccttgttgcgcttgctggcggaacgggccttgcggcggcgttcgtccatcggggtttcaaaggcgcggcggcggcgcatttcatccagaatgccttcaacatccagttttgttttgaggcgcttaagagcgcggtcgataggttcaccttttcttacggtaacttcacgcatgatttgttttcctttttctattcgtccgggaacgggagacaatacgtagtgctttcctgcttacaggtcaagatttttatcatggctgacctattttttgcccttgaaagaagggttccggcgttcgcagcgggtgcgaacgcctgcatgatgcggttttcccgctccggagcgtgcttcaactgtccttgccttacagtggggggcgtgatagaaaggaacgtctcccatgaaccggctgcatacattgattgacggatttccccgcgtgcggattctctgcatcggggacgtaatgctggacaagttcctgtacgggagcgtcagccggatttccccggaggctccggttcccatcatgaagatggaccgggagacgcgcatgctgggcggcgcgggcaacgtggtgaccaacctgtgcgcgctgggatgccgcaccaccttcgtcagcgtggtggggaatgacggccatggacggcaggtaaggcgttttctggaagagacgtgctgcgttccggagctggtggagtgcgaagggtatgagacgaccgtgaaggtccgttttgtggcggggaagcaccatttgctgagggcggaccaggaacagccgctgcggatggttccggagctggcctcccgttttctggaacgggtggacgcctgcctgccggaggccgaccttgttcttttgtccgattacgggaaagggctgtttgacgggcagacaacccctgacgtgatcgcccggtgccgtgcggcgggcaagtccgtgattgtggatccgaagggttcggattactcccgttacaagggggccacgctggtgaagcccaatatgaaggagttccaggaggcgaccggggtgacgctgaatccttccgcgacaggctgggaaagggatgccatcgcaggggctcaacggctgttttccgagttcggcattgagaatttgctcgtcaccctgagcgagcacggcatgattttcattccttcctccaatccttccgattttgtctgcattcccacggaggcccgtgaggtttttgacgtgtccggagcgggggatacctccctcgccagcctgggcgcggcgctggcggccggagctacggtgccggaggccctggtggtgtccaacgtggccgccggaatcgtggtgggcaagttcggaacggccagcgtgaccggagcggagctgaagaaggcgctggaggagaaggccctcaaggcgtcctcctggcatcaccggaacaatattctgacgccggaagccgcggcggagctggcggagcgtttccgacgggagaagaaggtggtggggtttacgaacggttgcttcgacctgctgcacctggggcacctgcattccttcatgaaggcgcgggaagcgtgcgacgtgcttttcgtggggctgaatacggacgcctccatcaagcggttgaagggagaggacaggccgatcaataatgaggagatgcgttccctgctgctggcctccctggattttatcgattacgtggtgccgtttgacgaggatacggccctgccgttgattgagaagttgcgcccggacgtgatcgccaaggagggctatcctctggaacgctggccggaagggcagtacgtcacatcttacgggggacaggctcttgagcttccccgcctggagggcttttcctccaccaatatcatcaaccgcatgaagaacagtccggaatgagcgagtacatcaggaatcagattttaggaatagcggataatttcaaggctctggccgccatggccggagagattgaacaagtcgcccgcgtctgcgcggataccctcagggccgggaacaagatcatgttctgtggcaacggaggctccgccgcggattcccagcacctggccgccgagctggtgggccgctacaagctgaaccgtcccgccatgaatgcgctggccctgacggtggatacctccatcctgaccgccgtagggaatgattacgggtatgaaacggtcttttccaggcaattgcagggattaggccgttccggtgacctgttggtggggctttccacgagtggcaatagccagaacatcgtcctggcgatggagctggcgcgccgcatgggcgtcaggaccgtggccctgacgggccagggcggcggggagatgagggactgtgcggatttctgcattgccgtcccctcccatgccacgaacaatatccaggagatgcacattgccgtgggccatctggtctgcgagctggttgagcaggaaatgtatggcgtctaaagctctgtttctggaccgggacggcgtggtgaacgtggacggcggctacgtgcaccgcattgaggattttcagctggttcccggtattctggacctttgccgccgggcgaaggagaaggggtatctggtgctggtggtgaccaaccagtccggcataggccgcggcatgtttacggaaggggatttcacccggctgacggagcatatgaaaggcgcgttcagcgccgccggagcggagatagcggatgtgttccactgtcccagcgtggatgacggccatcctgaccggaagccgaatcccggcctgtttttgaaagccgccgccgcccatggactggatatggcggcttgcgtgtccgtgggcgaccgggagcgcgacattcgcgctgcgcttgctgccggagtggggcggaatttccttttttccgcggaagatgtcccgactctcgccacagcccgtgtggaggcgttggaagaagtagcggcgtggctgtaggcggggattggctgttccgcaaacggcctgtcaaggatggccggggtagtttttttcgtggctgcccgcgtatttattcccaaagcgttacggttatgcttcattcttgaaagaaagctttacacgggaacggataccgtctataggtcaaacagtatgaaaaccttgctacccattctatccattgcattgtgttccggcgtatgcgccgttgtccaggccgcagatgcggaattgccccaggggctggagaaaagagaggcccgcgggcgcatcacttatgagggaggcgacggctccagctttgaaaaggccgtcgtcattgccggcgcaaagaattccatggatggagttcctgccgaaagtaaatggcttgagaaaaaatacaggaattatgtgaagctcaagcaggcgcttatggagcatgaaggcaagtactttgacgtgatcacgattaaaacgaaaaaaggcaaggaagtggtcgtctatttcgatatttccggcttcttcggtaaaaattaaagaggaaactatttttcccgttatttcttgatccggtttttccgttctgtggaacgcctccggttctttttcccgcctcaggaatggagttttcctgtggcgggttttgttgtccggaaccggagccgccataaagaaaacgggggaaacgggaatatccggagttgtccggaagtgcggccgcctgcgcaaacggttcatcaggcggagggaatggggcctgcatcagggggaagtaatttgacatacggggagcgccctgttagaagtggggcgattggtccgtagtttcgtggacttgtcctgtacaggctttttacttttgcacatatgaacttgatttccttccgatccatgatggcggttacggcgctgggagccggccttgctcttccggtgttcgcccagtcctcttctccggcctcttcctccgcgcctgcggcctcccgcgccaaaaaaacggccaagatgccggtgtatcccatcccgcagaagatgaccaggagcggcggttccgtgacggttccggccctgaagctgtcgggagcgcgggacgaacctaccgtgaatgcgctgaagagcatgttttccatcgctccgaacgggctgcccgtgcagatgtccatcatcaaggggagcaaaaaggccgccgggaatgttccgcagaaggccggggcttattccctgagcgtcacgccgcagggcatccggatgacgggctatgacgacgaaggcctgttttacgcggcccagacgctgcttcaactggcggagaagactccttccggcgtaacggtgcctgtggtggaggttctggactggccggacgttcccttccgcggtaccattgaaggcttttacggcctgccctgggggcaggaaggacgcatcagccagttcaagttttacgggaagtacaagatgaatacttacatctacggcccgaaggacgacgtgttccacggtttttccaagcgctggcgcgagccgtatcccgcggacatggcgaaggacctgaaagagctggtgaaggtcgcgaagcagaacaaggtgaattttgtctgggccgtgcaccccggagcggacattcactggggggaggcggaccggaaagccgccgtgaagaagtttgagatgatgtatgacctggggttccgctcctttgccgtgttttttgacgacatcggcggggagggcgctaaaccggagggccaggtggagttcctgaattacctgaacaaggagtttatccacaagaagccggacgtgactccgctgatcgtgtgccccacggcgtattccggtggaggtggccgctaccacgaggtgatgggggaacatctggacaaggacatcggcatcatgtggaccgggtccagcatcgtgagcgatatccggaccccggccttgaaggggatcaacaagtatttgcagcggccggcgttcatctggtggaatttcccggtgacggattacgtgcgccacgccctgttcctggggcgcacctatggcgtggatgcggacgcgatgccgttcatgcaggggtttgcctccaatccgatggacaagccggaggcctccaagatttccctgttcagcgtggctaacatgacctggaatgccaaggcctatgattccgacaagacatggaaggacagcatccggattttgttccccggctgcgcctccgccatgcagacgtttgccgaccataacagcgacggggggcccagcgggcacaattaccgcaaggaggagtccgtagagattgcccccgtggtggagcaggtgctggaattgtgccgccgcggcgccaaggtgtctgaaagcaaggcgtttgaccgcctgaaggccgagtttgcgaagatgtcccaggctccggacatgatccgggcgaaatcgaacaatcccgctttcgtcgcagaggtagagccgtggctcatccagttcgagtccctggggaaagctggaatgaacagcatgcagatgattgaggccacggaggcggggaatgcctccggagcgctgaattacgccatggaggccgcctgcctgcttgccgagatgcagcgttacagcaaggagatcagcaaggccatcaacaagcacgtgacggaggtgaccaagaaaaattccccgtggcagaccgccgtcaagccgtccgaactggtgatggctcccgccgtgcgggagctgctggacatggggtccacccccgtgctttcccgtgtgagcggacaggccgttggccgtgtgaagccttatgtttccaccaagtccaagggagggatcgagaagatgctggatgacgatcccgagtccttctattattgcaaggaggtccagaagaagggcgactttttcggcgtggacctgggcgctccgcgggagatacgcaccgtttccatcgtgatgggccgcaatgattccgatacggatgccgtgaacaagggccagcttgaggtgtccatggacgggcagtcctggtcgcccctgatgccggagtccagcgggcttcgcgtggagtaccagggaaatggcaagaagggccgttttgtacgctaccgtgctacggcgcagggtgttccgggcgggaagtccgacgtgtggacggccatccgggatttcaaggtgaatgcccccgccgcgccttccgtgctgacggatgcccccgcgttcaagagtgccgtggttgaagccggagacaaggatatttccctgaagcgcatcatggaggtgcatcctctgccgccgaagaagtccctggggcttcaaattccggcgggagcatccgtggagtccgcctccgtcaatttgaagacgccggacatgaagtgggccaaattgtacatttccatggacggaaagtcctggacggaggttccgttgaaggcggacggttccgcggagattggcggcgtgatcaagggcatcaggctgttgaacgccggatcctccccgcaggaggtgaccctggaagagttcaagctgaatcttgccaacaagggaggaaagtctgccgacaacggagccgccggggatttcaacctggctacgttcctcccggtggagctgtctccggagaaggtggagattccctgtgattccccccgtgcgaattccgccattgtcctgtccgacggtaaggaagcttccgtgctggcctgcggggccgacggacggtgggttcccgtgggcaatctggccaagggcaggaaggtgaatacgttcagcctgaagtccgtcaagaagccggtgaaggccctcggcctgaccgggaagaagggaagctccgtgaatgtttttgaagtgatctggaagtaacgggttccgccgggggctggcgcatgcggcagtcttccgcggggcgatgcccgttgaccctggggcggctgtttcctccgtggaatggccgccccggcttttttcagttcctggtttgccgggaggcgcgtttttccgccaggtgcatgcagccgaggacgagggcgatgatgaccagcggacccaggatgtccgcataccccaccatgcccgtgttcacgggggccacgcagagcaggaaccaccaggccagggtcagcaggcggagcaggggcggagctccgttgccggagaggaagacgtagatgacgagagcccatagctgcgggaaacggggcagcgtgaccagccattcccggtggtccccgccgggccagacaagcgtgccgtaggagccggctgcggggaggtcgccccacatggctcccgcgggaagcgccaggttcatcagcaggttcaggagcagtcccgcataaacggcgatcatcagggccctccattgggcgcccgtacgcaccgccaggaacaggaaagcgggcaccagcaggaaaggcgtcagttccagcgctcccatccaggcggggaggacggtgcctatttcagcgtagcggtccgcgccctgcggaacggcggaaagaagagcccagtacaggagcatcaggagaatgcagcggtacctggcgccctggcccaccgggcgttcctcatccggaggaaggcccagccatgctccggaatggggctggttggaggggtactgcatggcgggttgggaatggagccttttgtaacgggaataggcggctttgtcaataaagcccggttcaggtccggaaccgggattgtttttcaacaaaatgggcattcctgctgtccacattgtgacaaagttgttgccatcggattcttgccgcgggcggcttcttctgctagtcggtgcctgaaagggcgcggaaaaatggctgtgctccagtaactcattccttttgattatgtcccattccagattcctgacgattttaccggccctgtttttctgcctgctggctgtttcctgcggaaagaaggagaaggacgatccgaacgtcattgaattgaacttcggccattttcccaacgtgacgcatgtgcagggcctggtggcacaccatttttcccggcaggggaaggggtggtttgaggaacggctgaaggaggccaccggaaaggatgtcaggatcaactggtacgtatacaatgccggtcccagcgccatggaggccgtgtttgcccgctccattgaactggcttacgtggggcccagcccggccatcaatgcgtttgtgcgttcccgcggggatgatatcaggatgattgccggggccgtggaaggaggcgccgccctggtggttccggaggattccaccctgaaggagcctgctgatttccgcggcaaggtgattgccactccccagctggggaatacgcaggatgtttccgcccgcgcctggttttcccgcggcggcctgcacgtgacgcagcgcggcggggacgtgacgattttgcccacccccaatccggagcagctcagcctgttccggcagggcaagctggacggcgtgtggacggtggagccgtgggtgagccgcctggtgatgacggcggggggaaaggtgctggtgaacgagaaggagtccatcgctaccgtgctggtatgcggagcggatttcctcaaggagaagccggaggtggcgaaggccctggtgcaggcgcatgaagagctgaatgaatggataaggcagcatccggaggaggcccgggcgatcgtggtcaaggaactggaggaactgacccattccaggatagacccggcgttgattgcggaggcctggaagagcatcgtcatgaaggacaggatttccattcccaagctccagcagtttgtgcgggacgcccatgaggccggtttcatgaaagaggttccggacgtgggcggcctggtagtgcctgaggcggcggaggaacagttgaccatggtgaaggaggctgccggaagatgattgtgggtgaagaacattgcggccccggagggtgcaagctccgcattgccggcgtgagcaaggtgtttgacgggcggcgcggaaaggtggtggcgctggagggcatcaatttgaatatcaggagcggcgagttcgtctgcctggtgggggccagcggctgcggaaagacttccctgctgaatatcatcgccgggctggagtttcccacttccggggtggttgagctggacggggttcccgtgacggggcccggacgggaccgcaccgtgatgttccaggagtccgccctgtttccgtggctggacgtgatggggaacgtaatgttcggcctgaagctgacgcccggcctgacgcggggggaccggctcgccattgcggagaagaatctggagctggtagggctgaaggaatgcgcgcattcccatattcatgaactttccggcgggatgaagcagcgcgtggcgcttgcccgcgccctggctaccagcccccgcatcctgctgatggacgagccttttgccgccctggacgccatgacccgcgaacagctttaccaggatattcaggatatccatttccgttgcggcatgacgatcattttcgtcacgcacaatatgcgcgaggccgtgtgcctgggggaccgcgtggtgctgtttactccgcatccgggccgggtctgtgaggagtatttcgtggacctcccccatcccagggatatcaacagccgcgatctggcgcagttgtcatcccgcatcacccgtgatttgaaaggagccatggcatgaacaggaacaaatggtccaagtggggcgcccatgcctgctcgctcgtgtttttcattctcgtgatctggttgtggcagtatttgagcgaccagaaggtctggaagccctatttgttcccctctccgctggaggtgtgggagtatttatgctcctccttcctggacggatctctggaggaagcttcatggattactgtgaagaggctggtgatggggtatggaataggcctggtgatggggattcccctgggcatgctgtgctcccgcttccagctcatgcagaataccctgggcctcgtttccctggggttccaggccctcccgagcgtatgctgggttccgctggctaccctgtggttcggccagacggagggggccatgctgttcgtggtgatcatggggacgctgtggtccgtgattctggcgacggccaacggcatgaggaacgttccgcccatttatgcccgcgcagcgcgcaccatgggcgctggccccatttattgcctgattcacgtgacgctgcctgcctccgccccgtttgtggtgagcgggatgaagcagggctgggcctttgcgtggcgttccctgatggcggcggaaattttcgttcccatcctgaccggcttcggcctggggcagcttctgcacttcggccgggagttgaacgcgatgaaccaggtggtgggcatcatgttcgtgatcgtggtgatcggccttctgtctgacaagattctgttttccccgctggaacggttcctgcaccgccgctgggggacggggcaggcctgagggctgcgccttgcagacacagatgagctgattgcggccggcgaggggaaagcccgttacttgccgggggattccaggttccttttaagagcgtggacttccttgatgagggccgggagctttttgagcgcggcgtactggcggctggcgtccttgaacggagatgccgggaaaccccagtaggcgacgttttccgggatgtccgagatgactcccgttttggctcccagaacggatttcgaaccgattttaaggtgtccggagatgccgacctgggcggcgatggttgcgtagtcgcccaccttggtgctgccggcgattccggattgggcgacaatcacgcaatgcttgccgacgacgacgttgtggccgagctggatgaggttgtctatcttggtgccttcccccacgatggtgcggccgaacctggcacggtcaatggtggtattggcgcctacgtctacgtcgtcccccagctccacgatgcccacctggtcaatgcctacgtaacggccgttgtcccccatcaggaagccgaagccgtcggaaccgatgacggcccccggctggatggtcacccggctgccgagcttgcagcgttccctgatgatgacatgggcgtgcaggcggcagctttcccccatcgtgacgccgtccccgatgtcgcagccgttgccgatgtccgtgccgtcgccaattacgcaatgggcgccgatgcaggtataggcgcccacatggattttgtccggattgaaggtggccgtggggtcgataatggctgtgggatggatgccgggcgtgaaccggtaggcggaagccatgaagtatttcaccagggcgttgaatgccatggaaggattgtccacttccacaaaggcgacgttttccgggtacgcgggcagggccggaggcaccaggacgattccggcggaggtgtgaagaaagtcttcgaagtatttctcgttgccgaggaaggaggcttcctcatgagatgcgtcgagaagggaagcgaccccgaacacagtcagttcggggtcgccggaaaggattttccccccggtgagggcggccacggcttcaagtgtaagcttcatgggagtatgattccgccttcccgggggtaatgtcaagggttagttggccggagccgcgggagcggcaggaacggccggggtctttttcttggtggggtcaaagcccttgggagcgtccttgttgagttccttcatcacggagggggtgatgtccatgctgggcttcgtgtacacgaagacttggttggaacggagagcctgggcgctcttgtccagaatgaggtcatagttgcccttggtggcgatgccttccgtgatcttggtgatttcacccatgatcttggtggagcgcaccttcatctgttcctgaagggacttgagctggcgttccacgaagccgcggcgttcctgttccagcgcgatgacttcctgacgcttgatctgggctttctgttccagctccttcttgtccttttcattcagcatgggatcctgaagctgtttgaccatatcgttgaagtcggcttccatcttcttgatggtttccgcgcgggtgttgttggtttcctgcacggtctgggcagccttgtctacttctgcctgggcttcatgggtcttatagtagtcggcgaagagtttctgcacgtccaccgttgctactttaagttcggcgttggcagtggcgcttaatgccattgcagctgatacacataatgctgttttgaagaatctcataatttttagcgtcttctgactttgccagtttacatgtggaacggcatgcgtcaaccttctagctatatttcaggattgaacttttgtcatcatggggccactttaggcgcatgcaaacattttccaccaaggcccagttgaaggcggcccttctcaagcatcaccgcaagcatgaccacgtggttctcgttcccacgatgggagcgcttcacgacgggcaccgcgccctgctggaacaggcccgcaagctggcgggagaagacggtgtggtggtggccagcattttcgtcaatcccatccagttcaacaattcctccgacctccagacctatccccgcacccctgaaaaggatttggaggtgtgcgagggagcgggcgtggattacgtgttttccccctccccggaggagatgtattccggggagcgcagcattaccgtggaggagagctttttatccgctacgctgtgcggggcgtcccgccccggacatttttccggcgtctgcacggtgcttgccaagttgttcaacctggtgcagcccacggacgccattttcggcaagaaggattaccagcagctggcgattatccgccgcatggtgcgtgacctggatttcccggtgcacatccacggggcggagattgtgaggcacgggaccggcctggcctattcctcccggaacgcccgtctgacggcggaacagaaagagcaggccgtggtgatacggaaggccatgcttcaggccagggacgagttccgggccggaacggatgtccggacggtgaaggaacatgccgccgccatgattggggccgtgcccggcacgcgcatcgattatctggagattgtggatgcggagacgatgcagccgctggaggagaaccggaatccggccctgatggccgccgccgtctattttggcgacgtgcgtcttattgacaatatagaactttaatccggcacggattcccttatactgcgcccgtgattaccgccgccaacctccaccgcagctattccatcggcaagaaatccattgagatcctgcacggggtggacctgcacattgccgccggggagaaggtgttcctgtgcggtcccagcggagccggcaagaccacgctgatgtacacgctggccgggctggagacgccccaggagggaaaggtgacgattgacgacacggatatttacgccttgtccgctacggcgcggtccgtgttccggaaccggaacatgggattcattttccagaattacctgctgatgccggaactgacggcgctggaaaacgcgtgcctggcttcctccatcggaaggaggccgcgcgtggagtacgtgacggagctgatggcgcgcgtgggcctgtcccaccgcctgaaccatctgcccagcgagctgagcggcggggagcagcagcgcgtggcgatcgcccgcgccctggcgaatgacgccccgattatttttgcagatgaacctaccgggaacctggaccggaagaacggcgcggaggtgctggaccttttgttcggcctggcggacgaatcccgcaagacgctggtaatcgtgacgcatgacgaacacctggcccgccggggggaccgcatcatcacgatcatggacgggcaggcggtctgaggccgtccggtcctgcgagttttttatctctccttttatttgccgtccgccgccaaatgcaggacggcctggtgcacgccccggaccacctgggccatgcggcggtagtccagcgtttccggcaggtctccgggctgatggtagttcgggttccggaagaaggaggtgtccgtaatcatgacggcgggcaggtctttggcccagaagttgcggtggtcggagaagtccatgcacatgcccttgatttccggcaggttcaggcggacggtaggcaggaaggactgcatgtttttctggactgtccgcgccagcctgacgctgtcccagttgccgacgatggcgatgaagtcccccttgtccgggtacagggcgcccatgcccgcggcggggtaggactggctgttttccctgtccgagaagtagccgatcatttccaggcagatcatggctttcacgcctatctgctccgtataaagtttttgggcgtgctgcgcgctgcccatctgttcagtgccgaagtagggcggttcctcgttggcatacgcgatgagttcaatggtgtcatggggggagatgcccttgagcatgcgtcccagggccagcagtccggctacgccgctggcgttgtcgtccgctccgggggtgcttccgcaggtgtcgtaatgagcgccgacgatgacccttttggcggatttgccggggaaaacggcgccgacgttgacgaaggtgcgcttgtccgccgtgaaaggctggtacgtgaccgcggctcccgattccgacagggaccgggcgatgtattggaccgccctggcctggttcttttcataacccgccgggcgcgggtggcaggttttggccaggtagaggacgtcctttttcagttcctgctccagccccgggcggacggcagcggcgggagcgccgccggccgcggggatggtgcagtgggaaatgatgcagcccgtggagacggtgaggatggccagggcggaaaacagagagaggtaaacccggagtttcatgctccctttatatcaatacgcatcaggcgtgacaatttcaatgtggcaaagcacatgtgcgggtcatggaagccttttcttcctagtgggcatcactctgaatgggggatttctgatgaaccatatatccatgaggaggtgtccggcattcagaagagtccgccctatattcctagagaatagcgcatccactttgtttaccttgggatacggatttcgttaatgcattggcatcatttttttccacctttttttcaatgaaaaggtgattgttttgtccaaaggaatagcaatggaagttgtcaaaatcggtaaattccataattcctgccgtgtggtctttcatgtcgctataaggattatatacaatataatttgttccttctttcccaataaggttttgaaaggctgttcttccgtccacctttccatcgctggatgtggtgatatgtgcagcatacaagataccctcttgctcaaacagggccatgaagcatccgctgaagtcaaagctgacggcgtatattttttctccacgcgcatgttgaatgggatagcaggttatttcttgttccggtttatgtaccacgatattaatgccttgtgtatctatgtcgttgaaaggtggcgtaagttcgtcttttgccagataaaaaccatagcaactgcatcctgacgggatggggaatgaagatgtagtttgaagtttttctcctattttttctttcaatgctgaaattccttttgcttcttgccggagcagatcaggtaatgttttcatgaatagtatttatttctgttgtatttgatatgatccggtttttcggattcactagaacaaacctgtgtcgagcgggaaatactcaccgcatgtacggtatatttcgaaaacgcgggtttgtatggttactgtatgtggctttccggaagtttccgtcttctcttttccaagcatgagatattatttctgaaagcgccttgcggggtgcggattaactatttcatatccggctgtcctctatcgcatgcttgcatgagatagacaaaatggaagtgctgggcgctcctgaatttacgtctgccgcaggcggtattgttcttctgcctccaacggcaacgtggaaggagaggatcggtattgcaatcatgcgggttgttgtgtagcttgttgcgcatgtgggactggattatgatcaaggatgcgctccgggcgatcgttgaaattttcatcctgtgggtattcctgtaccagatttaccgcgctttccatgcaacgcgcggcgcgcgcatcatggtggggctgttcgcctgtttcctggccttggtggtgctggcctttttcttccagttgaacgtgatttcatggatcctgacgcgcattttcgcccccggcctggcgctggcgctggtggtgattttccagccggagctgcgtgtggggctggcgaagctgggcagccatccgttcttctcctccttcgccaagcttcagcgggttgactttctggacaatttctgcaaggcggtgagcaagctttccaaccagcggttcggcgccctgttcgcctttgaacgtagcatcagcatgaagcccattgaggattccggcgtgaagctggacgccattttttctccggaattggccctgacgattttccataccaagaccgccctgcacgacggaggcgtggtgatttccggcgaccgcatttccgcggcggcctgcgtgttcccggtttcccagaaggagatgagcgaccgtaccctggggctgcgccaccgggcgggcgtgggcatgtccgaggagagcgactgcgtggtggtggtggtgtccgaggaaacgggggcgattgccctggccgtgggcggcaagctggagcgcaacctgacgccggaacagttgaagggccgccttgaagagctattgaatatttctccttccaatgaaaaaactgctattgcttaactggccggccaagctgttctgcctggtgctggccgtgatcatctggtcttttatcaatcactgggtgaccacgaacgacggcgtgccctcccgtgggcagcttgaggagattagaagatcccatccctgaagatttaccgttatgaggaatttcattgttaccggaaccgatacggaagtcggtaagacttatgtgagctgcctgatcgtcaaggccctgagagaagcgggcatcaatgccgccgggttcaagcccgtggcctgcggagacaggcaggatgcccgtcttctgcgcgaggcaggaccggcggggctgacgctggacgagctgaatcccgttttcctgaagaacgccacctgcccttatgtggcggcccggctggagaatacgcaggtggatgaaggagccatccgccgcgcctatgacgccctggccgccgcgcatgaatgcgtgctggtggaaggtgtggggggatgggaagtcccgataggccccggccggaatttcagcgacgtggccgcggatttcaagctgcccgtgctgctggtgatcggcaacaagctgggggccatcaatcatgccctgctgacgctgaatgcggtcaaggcgcgcggcctggaatgcctgggcattgtgtttaataacgtgaaggatgaatgggatacggcctgcgtgacgaacaggagcatggtggaggagttttccgacgcgcccattctcggcgagctgatccatggacaggattccatggacattgacgccttgatggaacgcctgcgctgagcacggtagcagtttgacggatggaagaagatggggggaagaagctctttcctccccgttcgtttcagggtgtgaactggcggcgtagaggaaccggcatgtagtgttaaaaagaccaggggagagggacaggttttcagctccggaagtcctgttttgacaggaattgagacgggagggcgtaaataaggaatgtttttgtccagagttttcagcattcctgtacggttttttattgccctgctggtttgtttcccgtgggagctgctggcaggggaggtggtaactgcgcctgtgccggagttttcctcccctgcgctgattccctatccttccaaagtcgtcaggggtaagggtggcgcgcgttttaaaagcgttcatgtacatttgggccgggatgttccccgcagggatgacctggtgagggaaatgaaggatgtattcaggatgtccggcattccggctgccgtgagcaaggatgtttttgaggaaggttccctgacatgggagttaagcctggacgccggaattgagggagaagcgtatgtcctgtccgtcacgccggaaaagacaactgtcagggcaggggactttggcggttttttcaatgccctgcaaacgctgcggcagctggtttccaaagagaaggaaggttttttcatgccgtccgtgcagatcagtgacgaacccgccttcgccctgcggggtatgatgctggacgtggggcgctattacatgtctcccgcgtttatcaaggagctgatgcgccgggtttcccgctacaagatcaatacgctgcatctgcatttgacggatgatcccgcgtggaggctggaggtgaagaagtatccggctttgacagaccgcgcctttcactggaagtcacggttgccgggcaaattttatacgcaggaacagttgaaggacctgacggattattgcgcccggctgaatatccaggtgattccggagatcgacatgccggggcacagccagccgttcgccaaggccatgaagaccggcatgcagacggagaagggcgtttccatattgaaggatgtcgtggacgagaccgttgccctgtttccaggaaggttttttcacatggggtccgacgaggtgcacattacgatgaaggattttattccgcgcatggcggagtatatccgcgagaagggcaaggaggtgatcgtgtggtcgccgggtggcccgcacgataaggattccgtgctgatgtgctggggcgagagcgaggccggagcccggatggacaagggaatgaagcgcattgacagcaatggcttttacattgactgggctgattcccagtccggcgtatatcaggtgtttttccagcagccctgcgaggtgccgcagggggatgagaaggcgttgggagccatcatgcccgtgtggtgcgacgggaacctgagcagtgagaagagggtgctggaacagtatcccctttacccctgcgtactgacgtttgcggagcgcgtctggcgcgggagcgccaccaagcggaaggattacatggcgcagctccctcccaggagaacggccggatgggcggagttccgggagtttgaacaacggctggtttcccaccgtgaccggtttttccgggacgttccctttgcgtacgtgaagcaggcggatatggcctggagcctgatagggccattcgaccaccggggaaagaatgacacgtcctttgaaccggagcggaagattgcgccttcctaccgggacggggacaggacgctggagtggaagaagacgcccgtttacggtggagccgtgcatatcaggcacctttttgcgatgttcaatatgcaccggaaccagtaccggctggaccactggcccacgctgatgtcgggggacgtgggaaagggcagcggaacctgctatgcgctgacttccatccgcagcccgaaggatcaggaagtgtggctgatggttggcctgaacggcatgtgggggcattcaggcgggtaccgcagtgcccgtgctccggagcaggggagctgggatttttccggcggggacgtgtggctgaacggaaagcgcgtgaatccgcccaggtggccgttcaagagcctgccctggacggattgggggaaaggccgcattgaagaagcccccctgacctgggaggggtatttcttccgtccccccgtgaaggtgaagctccgcaagggattgaaccgcgtactgatacgcagcgtgttcggccactggaaaggggacaacgggcagagaagctggtttttttgctgcattcccgtcctgtgggatggtgtccattaccgggaggttccgggcctggaatatgatccccgcccggacgcccgctgacaggcaggcttcctgccgtcactctttttcaaaggcggagaggatggcctcatgcacgtcctgcgcggaacggatttccggcagggatgccgggccgatgaatacgggctgctggtttgcgggtacccggtccctgccatgggagcctttcacctggtctccgttgaggggaatgactttcatcagtgcgcggaagcccagcttttttttcagcagaaaggcggcggcgtggaacatggggaaggagagggccgggtcaaagaacatttccgccggatcgtagccgggcttgcgatggatgtctacgcagcgggcgaagtccggggccctggcgtcgtccagccagtagtagtaggtgaaccacgcatccggggccgcgacggcagtgaagtccggcaggcgttcttgcgccgcaggattcaggccggagaagtccgtttccctgatttcctccactccgggggtggcggcgagcagcgttttcacctcttccttcacggaagggtcgttgatgtaaatatgggctgtctggtggtccgccacagcaaaggcccgggaggcgccgcagtccagcatttccgtacccatttccggtttgacggtgatccagccccgttcacggaagaggcggttgagggcaatgctgcgggagacgtcggaaatgccgtattcactgaggataacgggggtgacgccttcctgttccagaaagtcgaccaggtcgcagagcaaaccgtccatggcttccgccgcccgggccgcctgcattgaggaagggccgaatttctgaaggtcatagtccaggtagggcaggtagatgaggttgagggcggggcggtgttgccgttccacccaccgggcggagtccgctatccatcgggaggactggatgccggccatggggccccagaaggtggggaaggggaattcccccaggtcttttttaatggtttcccggagttccatgggctgggtgtagatgtcgaagaccttgcggccgtccgccgggtacatggggcgcggcgtgatggtccagtccgccgtggagtacatgttgtaccaccagaagagcttggcgcaggtgaagccggggccgtaccgttcccgcagcttttcccagaggcgcggtccctgcaccagtttgttggattgcttccagaactggatttcactcatgttccggttgtaccatccgttgccggggatggcgtgctcccgcggggaaagccccgtcacataagtactctgcgcggagcaggtgagggccggaaaggcaggggggaaggaggaaacgcgcctcccctccgcccaggcggagagtcgcggcatgtgttccatcatctggcgggaaagggccaccacgtcaatgacggccacacgggtgcgggggagtttcatggaagggatattagcggtttgatgcgggaattccatctttccatttgaaaaaaatggcggcatccgtcatgattccccgcatggaacgtcaggataaacgacttgtggaccagttgcgcccgatcagctttgaaacgggcattgccccgaatgccacggcctccgtgctggtgactttcggccgcaccaaggtgatttgcgccgttacgattgaggaggatgtcccccgctggatgaaggttcagcgtgtggagggcggctggctgacggcggagtattccatgctcccctattccacgcttgaccgcaagcggcgcgatattacggcagggaagctggacggacgttccagcgaaatccagcgcctgataggccgctccctgagggctgccgtggacctgggcaagatcgggcagcgcacgatctgggtggactgcgatgttttgcaggcggacgggggcacccggaccgcttccatcaccggggcttccgtggccctggccattgccgtgaacaagctggtggcgcaaggcaagctggcggagtctcccatgaagaggctggtttccgccgtttccgtggggatgctgggcggggaagccctgctggacctttgctatgtggaggacaaggatgcggaggtggatatgaacctggtgatgacggaccgcggtgagtttgtggaagtgcagggctccggggaggaggccgtgtttacggcggaccagatgagccggatgctggaactgggccgcaagggcctggaagagattgccgggcttcagcgccaggtgatcgccgatgcggacaagccggacgccgacgcgctggaagggctgagcgcctttttcggcagcggcaggcaggcatgaatttcccatggcgcgggattgttccggctcccggcaaacgggggccgcggaggaatcccggcgcccttccaggcccaacatttttatgagaatatgcttgtcctgactgggaaatcacgttaatagtagagacgaacatagataaccacgtacggttttcttaaactgtaaacattccatcatatccaacaatgaaagtatcttttgcaacacgccagttacgcagggggttcaccctgatcgaacttttggttgttattgccattatcgccctgctggcttccgtggcgtacggtccgattctgaaccagatcaacaagggcgaccagatgcaggccctgaccaacatgaagaacgtgggtgtggcgatgaacgagttcaagtccaacagcaagctgggcaacttccccgatgacatcaccgcggaccgcgtggtggcgcagcacaattacatgagcggcctgggcgcgctccagggggatacctccaatgactacttccgccagcttctgggcaatgagtccgtttccgaaagcaacttctacgccaaggtgcagactccttccggcggttccaccgttactcccgacggtgaaatctatgacggcaaggccctgacccccggtgaagtgggcttctcctacgtcatgcgcaagggtgacaataacaagaaggtaggcattggcagctccgtgggtgaatatcccctgatggttacttccgtgctccccggtgaagacggcagcaccgtcgtggctggcaacgccgtccgctttgacccggaaagcttccgcggcaaggttctgattttcacgaccgcccagagcgccaagactctggaactggatgacaacgacaaccttcaggacaccttcattcccaagagaaggggcaaggatgtcagtgaccagttcctgattctcacgcctgatttcagcggccaggaataagttttttccgttagcatgatttgcacagggcgcatccttagggatgcgccctttttcatgccccttcactggaatctggagcattccgaaccgccgggccgcaccgtatgacagaaatggccggcccggtaaaaagaggcagcggccacggtcggcccgggaacaaggagtaaaaaacgttgttggatttccccatggttgtttggattgcatttgattagctattttttatatctgccgccggatagccgcatgatggggcagcggaaaggcgcggcccgtgagctattgtcatttatgggtcatccgttgtgcgctacggagtggtcatggtttcaatacacttatcatgaccaagattgtgattgccctgttatccttagcggcgccactggcatgcgccgccctgccttccggttcaccctccggagccgccgtccctggtgaggagaaggtggttcaaatgaagggcgtcatgtccttgtctcccgctatggtcaaggagatcaatgaaggcggagccctgactatttcctccccctcttttccttccggttattataccgtgtaccgttttgtttcctcccgcgggaatgtagtgcaggctttttccgtgttggagaggaaccagctccaggcccttgggatggctcttcccgtgcaggtaaaggcccgggaagagctggatgaagacgtatcctggaagctggaacgggaagtggtagccatgttttcctatggaagatcctatatgccccattgtgaggaagtcctggtgcgggaggccgtgtacggccccttgtccggcgcgatggtttcccatggcggcggcggaggattttacggagggcctcccggcaggggaaacgggtttgccgccaaccagcttaaaccaagtcttccggataatgaggccagctccaagccgtcagacgacaaggagacgcctgtttctccggacaggaagcctgacggagggacagaggcggccggagatgaggctgtggctgattccgggaaggaagagctttctctggattccctgcttactgaaaatacggtgccgacgtcttctcccgatcccaagacgctgcgtttgccggcgtctctgaaggcggaggccgttccggaaccgtcttccgccatgctgggcatgttcggcatcgcctccctgctgatgcggcgcaagcggagttgaactccggtcccgttctccattccggttttccagccgggaaggaatggtttttcttttccacgccggaacatggtttgcaaacaggcagtgtcatgagaaaggcgttccggcctgaaaaagccggaacgccttcatgcagctaagtgaatggattttatttgcctgcgggcgtgccgaagacgttgatttccgcagcagaagcgctgttgccgtccagcgagttcgtgccggtgaagcggaagtagcgtacgggttccttgacgttcttgaggttgacggattgctcgatgggattggcgcggaggttggagaattccccttccgccgccttcgtccaggtttttccgtccgggctcacttcaaactggtatttgtccgtcattccggaggtttttccatcctgcctgggcaggtaggagaagctggagacctggtagggtttgcccatatccaccacaaaggattggggcgcctcagccttggcgaaccaggaggtttccggattgtcgtcaatggccgccacagcgtttccggaagtggcgtttttcaccttccacccggttttgctgatgccgaatttggcctggctgacgggacccagcttgccgttggagaattggcagcgagccttgactgtgccgctttccgcaaatttggcgccctggctatagacgggggagccttccttgggttcgctgccgtccgtcgtgtacaggattttgttcttgccgtccgcaaggatgatgaggttgtctccgcggcggaagatggagggccgcacggcgcctgccggctggcggaagagggagaattcagagatgcagggcgtggcctggctgcccgtgatgcgcaggcgcagcttctgggcggtgatggggcggttcaaacgccgcatgacctggttgccgatggtctttccttcattgtcgatgcagacccatttgccgttgatgaaggcgtcaatgttgaaggagtccacacgctggcccaggcggatctgttcgcgcagccggatgacgtcgaaggtggcgggtttgggcagcgtaatgaaggcggtgggcgtcaggttgtcgtcctccacggcccagtaggtttccatgttgccgtccgtcatgttggagggggcgaattttttgtcattgccgcgcgtctggctggccgtgacggtggcgcccagggcatagtctctggcatacagcttgtcgcgcagttccttgaattccatcagggatttgacgtccgcagggtccagtttgccggttttgtccgccgccacgttgaggatgaggttggctccgcgtcccacggagtcaaaccaaacctgcatgagttcttccggggatttgacgcgggaagcctgcccctggtgccagaaccagccggaatggttgatggtggtgtccccttccgccggcacccagcgttctccgccgcgcttgccggttcctccgcctccgccgttcagccctacggtgctccaatgggggtagttgacgtggcccttttcagagccgccccagcgggcgtctccgtagtggcccgcgccccagatgatgcagttgggctggattttgcggatcatctccacgattttttcaaagttgtagtacttttccgcgtcgccgatgttgcgcttttccttggcccctccgtagtagccgtcccccccgttggcgccgtcaaaccagatttcaaagacggggccgtagttggtcagcagttcgcggatttgcttgtagtaaacgtccagatagccttccttgccgtagtccgcattgttgcggtcccagggactgaggtaggtgccgaatttaatgccgtgctttttgcaggccagggcgaattccttgaccacgtctcccttgccgtttttccacgggcttttggtgatgttgtggtccgtggacttggtgggccacgcgcagaagccgtcgtggtgcttggccgtatagatcattcctttcatgccgcccttcttgaaggtggaaacgatgtcggaggcattgaagtccgtagggttgaagattttcggattttcgtcgccatagccccattccctgcccgtgaaggtattcaggccaaagtggatgaagccgtagaattccatgcgctgccagttgacctgggagggggttggcaccgccccgtagggcttgggagggtctgcggcccagccgggcagcattgaagaagagagaaccgttccgaggaagagggaggtaagcttgttcatgcagaaaaaacgtgtgttaaaaaatacggggaatgttccacccttctttcatacgggggcttggctgtcaagttgaaagggagggtggaaggggaacgaagggggttagcaggctctaacttcgacatgcggggaattccgcttgatacgggaccggggtccgtttagcatacagaggacttttgttcccatgtcctatttccgttttttactgctggcgctggttcttctgaccggttccgcgtttatcagcgagagcgctcccgtttacatggcccggcgggacagcaagttcgcgctcgtccctctttgcgacggttttgattttccggtaggcaagcctgacggcaacggctattaccggtcccgcggcctgcgcgtgaaaagcccccgccacatgggcgaggactggaacggcaacagcgggggcaattccgatctgggtgatcccgtttattccgtgggccacggcgtggtgacttacgcggcggatgcccgcggcgcgtggggaaaggtggtgattgtccgccatgccttccgcgagcccaagtccggaaaggttctttgctgccagacgctttacgcccatttgaatgatattaacgtcgtgctggggcagttggtgctccgcggcacccaggtgggcaccatcggcacgaaccgcggcatgtatccggcccaccttcatattgaactgcattacaatccggacgtgaattgcggccagcagggtattcccaagacggagcgcaattacggccgcctgacggatttcatcactcgcttccgccgcctgcctctggaaaagaggatggtgcgcgtgcccatcggcgggttcctgccttacaagggcacggaaggactttgattttttgacggatgacggacggtgaagctgtgcattttcggcggttcgtttgatcccgtgcatgaagggcacgttcgtgtggctgcgcatgcgcgtgagtactgcgggctggaccgtgtgctgttcatgccgtgctccctgtctccgctgaaggagcaggcccccgccgtgacggatgaccagcgttgccggatgattgatgtggcgcttcggggactggattgggccgtgcttgaccggacggatttgaatcttccgccgccttcgtggtcttggagagtggcggagtgcgcagcggaccgttatcccggcgcggagctgttctggctgatgggcaaggaccagtgggattccctggaacagtggggccgctgggagcacctggccgggctggtgacgttcctcgtgtaccaccgcggcggtgaaccggcgcccaaggaaggggtgcgcgccgttttcattgggggggatgagcccgcttcttccacccgtgtgcggcatgatctgcgtacgggcgtatgccccgtgcctcatttgaatccggaggtggagagcctgatcaggcgggaaggcctgtacggcgcggcgcgcagctagggggggagcagcctgttttgcctcattcctgcttgtttccgggggcttcctccgcgtagtggacctgcatcagcgtgagcccgtccggcggggcgcagaacgggcttttatcatccgggcgtgggtagttaatgaggcgcgccagttcgtccagcgtgatttttccccgcgcggcttcatgagcggctcctgccatgaggcgcaccattttatagagaaagcccgttccggtgagggtgatgaagacatgttccccctcctgcaccacctgcgcctgcgtgatggtgcggaggaagtagtccgccgggatggggcgcggttcattgccgcgcagggccgcaaaggccgtaaagtcatgcgttcccagaaagagccggacggcttgctccagaatgtccgtgctccaggccagtggacggtgccaggccagcccggcgtcaaaagggctgaggacaggcgcacgggagatgcagtagcggtaggtttttcccgccgcgctgaaccgggcgtgaaagcctgggggaacgtattccgcctgggtgatccgtatggtccggggcaggcgggtattgagggcggtgggccatttgtccgcaggaatgcggtgggtgtccggcgcatccacatggaagacctggcccagcgcatgcacgccggcatccgtcctgccggagccgtggatgcggacggcggagccgaagagggcggaaaaggcgcgttccagggcgtcctgtacggtgcggccccccggctggctctgccagcccaggtaggggcgtccatcgtacgcggtggtgaaacggatgcggggcatggggccgattgtgttggaacggtccggttttggcaagcggcaagtaccgtgctgtgacggtttggaatggatgccgtgcgttccgtccgctccctagcttggaggccataaaaagatggctatacgaatacaggattttggaatgctgcatgtggctccggatttgtccggcgtgattccgttgaacgcgtttgaagcgcaggccgccggagtgcggaacctggctgcgggcgcgatggatttggcaggaacggcgggtgccgcgctgaaggagatgcaggaggtgagggatgccgggcagtgggcgcaggcccgcgacggcctgtaccgctttgaacaggacgtgatgcgggagctggaggccggcggggagccggaccgccttcaggagaagtggaagaaggcgttggcggaacggcttcccgcctacctgccgggccggatgtccgccccggtgagggagcgcgtggagctggcgagggagaacctggagactgccggaagcatttatttgcagaagatgtcccggctgggtcagttggaggaggctcggcggtcctgggccggaggggtggagtccgccgtagagcagggggaggattccctggccgaacgcaggattgaagaaggccgcggcgtgtttgtgaccggagatgaagcctcccgcatggcggaggaagcccgtgcccgtgtggcgctgaaccgggcggtggaggaggttcgccgtgatccggccgcggcagtgcgcctagtttcccgggagcgggaaatgcctcagaccccggaggaaagaagagtggcgcaagaggcttctgcggcatatggagagctgaagcggcgttatgcggatgctgtggcggctaccgtatccggcggcggcctgctgcgggatgacgggctggcgaatgcggagaagcacggcttgatcagttccgagcagttgaggcgttatacggcttccagggaccggaggcaggcggcggagttttccggcgtcagcattccgggagacgacatgcagctgtgccgcatggcctccctgattgatgaggattgcggaggagagggggatgcggacgccatgattgaagtggctacttccggcctgcctgcgccgcaggtggaaagactcctccggcggcgggaggtgatgatgaatgttcccctggagctgcgccgcgcggcttcccgccgcctgtcctccatgttccggaacggagcctggggaccgccggaggacgcccgtgcggtggaggaatggaaacgcgtccagatggagttggcggaggccgtgcagaggtctccggaacagccggcggaggagatggagaaagtttttgagaaggaaaaccgcctccaggatgcaggctgggtaggttttacggatatgaatatgaataatggaaaggaaggcaagtgatgatggaagatgagaggaaccaggaacaggacgggacatttttggtagaagaaggcgtgccggaaaaggcctccgcaacgatggaggaaaaccggttgcaggaggagaacgcggtatccgcagtcccttccggcgcgggagaattcccggagcaggtggcggcggcgaaggaagagtactggaacagcgtgctgacgggagatgtgatgaccattccccgggaggtcaggcagaaggcggaagcgatgtatccggcgggaacggctgaccgggaaaggattgccgcgtgcgtgatgcagtcatgggtggcggattcgggggaaatcccccgcgaacgcatccggagggactggaagagtatccgggaagaggtggcgcggcagtatggagcgtccggcaaatctgatgacgaattgtttgtggccgtctccatgcacaaccaggtgcgcctttcccagcgggaaaccttgtttgaattgtaccaggaggagtatgatcgcacgctggccgggagtggaacggctccggacgaacggaggaaagaggctgtttccgcgtggccggaggagatgcaggccgtggcggaccagttgaagagcagggccgtgtccgacgccctggatgacaggaaccgtctggcggacgccgccggaattatccgcagggggctggaagggctggtagccagtgaggccccggcgccggaaggttttcccgccgtgcaggtgaaccggaaggcggttgccggagttccggacgtcgttcgcgccgtggattgcctggcgtccctggaggacggggaccggcggaaggtgttccgcatgatggccccctacctgcgttcccggcccgctttccgggatgccctggggggcgcgctgaaacgcggagcagcggaagcagcggaaaatgtggctcatctggccgtgaacggtgcggcctgggctctcccggaaggccgggagaaggaggcgttggacaggtattcccggagttttgaggaactgcggaattttgccaggatggagtttgctcccctgcgcggaggaaaggatgccccctggttccgggagatgctggtggacatggcccagcagggcgcatccacggcgctggcgttcagcggcccggccgggctgggactgctgatggccggggagacgggccgccacatggcggatgcccggcgcatgaatccggacggcgtgtttgacgcccagatgggtggcgcggtcgtgtccggggggatgaacaccctgctttccttcgggatgacgaagctgggccagcggatgctggggcaggggatgcgcgcgttccgggccatgaggtccgcttccgggaacgtgggagcggttctttccggaacgggagccatggcggcggatgccgtgaagatggcggcggagaacaagctgatggagctgacgcccatggtggcccaggaaggcgtgggagcgttgacggacagggtgtccggcgtggactgggagggatggaaggagcggcagatgtccgtggacgaccagttgagggaggcggccatgatgatgccgttcctgctgatcggcgcgggaaaggcttccctgcaccatttccgccatgccggaaccttgctgggggacggagaacctctgaaggtgtttggcattccggatgaagcggtaacccgcatcctgcgggagaaggacatgcgccgtgccggggagctgctgcagaagtccctgcgtgattctcccctgtggggatccctgtacatttccagaaaggcgctggaatggtcccgcgcgctggatgaagccggggagccttttttaaggacggaacaggacgtgagggactttctggaactgccttctcccgtgcgcacgaagccctggaagatgagggattttccggagtcggaagcggtgttgaaaaaactttttccccatccggaccatgcggcggccaggaccaagtggctgttgcgggccgggctgccccgcgtgggagagtccgccgcggcggatggccgccgcgtttatgaggcggagccggcccccggcatggagatgaagagaacccggggccggagttcggtagaagaggccctttcctcctggtatgaagccctgtgccgtatggaagaggaagacctggggctggccaggaacaggaacgggagggagattccgtggcgtttgaggaatgcggcggattacgacgtgcaggcggacgccctgcgccgcgcgtttgtggaagacaggctgaagaagcgcgcctaccgcccgtacaggatgctgctgctggcttatccggaggaagcggggcgtagcggtttttccggcagggactgggacgccgtcaccgtggaaatggagcgccggacgcgcgccaatgtttacgagggagtgatggaacgggtgcacggcgcttcccatgaggaggtgtccgggcatgtggcccttcgcctgtgggagtcgttttgccgtgatgagggttcctgtgccagggcgcgccgctggctggaggaagggagctccctgatgaacgctccggatttgctggccggggattccggcccggacggcctggccgccgccctgtccaggatgagcggcatgatggcttccctgggggaccgggaacgccaccgggtaagcccggagctgcgggagatgaaccgcatggtatggggaacccaggcggatgtgaacagcttgtaccaggtgcttcccaatatgaaggagtttgacgtgcatgtagggcgcggctacacgccggtggagagttacgggcggctgctgtcccgttttctggaagtggaaccggaacacgtggcccgttatgccaccgtgctggatgcgccgcggctgcatgccggtccggagcgggcggttccgcgcgtttatccgggtacgcagaaagcggtggaaaatctttcccgcctgactccgcgcctgttccagtcctcgcgtgggagcggaggcggggaaaggctgtggcgggtaaaatatcccaatggcaggtggtcggcctggcatccttcgcaggaggcggcgggagcggacctgatggccaatgtctccatgatgttttcccccgcctgcacggccaagagggatttgatccggagctgggaatggcacgcccgcagcgggcatccggaatgggataccaattatctgcggctgaccgcaggactggaaaacgtgcagggggaaaggctttcctgcctgtatgacagcctgacggccatggcggtggcggatatgctgaaggccggttacggcgtgcggggcgccgtgggttcaggggaccgtctggaggtgacgggcaggggccgcgtggccgctgaaacgctgatgagccatgacgccctgcgggaacgcatggatatccacggcaagtacgtgggggacgtgcagcggctgggagtggatgcggacaatcagcccgttccctcggccaagggactggtgatgcaccggctgcggctccataatacggagaatcccctggccttgattgaggacaaggcggaggtcgtatgggaccggctgatgcgcacggaccagctttccccggaggacgcgtgggagatgctgaaacgtctgggccgcgtgccgcgccgcagggcgcttcccggagaaacggaattgattgaagagctttcccagctctccaaggagtatttttttgcccatctggaccatgacgccgtgccggagacggtagcttcctgggcgcgctacggggccgcaagcccggacaaggctctggaacctctggaggaattggtgcgccgcgccgggctgctgaagggaacgctgaaggaggggccggaaaccgccgaattcatgggcatgctccgtgaaacggtgggaatgaatgaccggatacgggctgaacgcgcctgggacgcaggcggtgaggaggtgcgccttcccatgatggaaaggtacgcccatagcctgatgaccggcaggctgctgtccaccgcgccggaccacgtgagggaggacctgctgcgttctctggccgcgctggacggatacgggggcgggtccgtccgcaggatggaacggctggcggaacaccgcatgacggaactggcacgggcgcttcaggagtttccccagttgaatgcatggcgtccggacccggagcatcccggcctgtacctgcatttggtgaagcggccgttcaaggccgggaagggaaccctgcgcgcgaaggatgtttctctggaagccatgggagaactcctgccggaacctgttctggaggcccccctgtatatggaggaggatttttccgtcaggagcggcgttcctgcccctgccgcatggcgcagccgtccggaggtagtccgtgcggtggagacgctggacgtggtgaggcgggattttgcagcccggccggaagccgcggagtccggcgtcatctggcaaggaagaacctaccggattgattccgggacggcccccggaggggtggcaacggcctggagccgggaacttcccctggatgaagccgcctccctgattgatgttctggaccgcaggcaggaggaaatgagagggggcatgctccccttcctgcctgatccggaggaggcgcgcgcgatgtacgccaactgcgtgatttaccgtgacccggacgacccggggcataccgttcgcctgatgccgggcattccggaaagccccgtacggcaggcgcgcgctccgtatgtggtgcatgcgtggaacggcgtttacctggacagccggggtctgcctgcggcgtccgagcgggattcctatattccgctggagcgcttcacaggcgcgggagaggagccttctccggaaaccgctcgggagagccgcgcccggtccctgggccggattctggaaacgctgggggatgcggatgcgcaggaacgctggtggtggaacagggagcaggccgttgggtgcttcatggaagacgtcgtcaggctgtatgaagagctgggggtacgctcaggctatctgaggggggagcttgacctgcttgatcccgtgatggttcaggctctgcgcttcgtctcccacgtgctgaacgatcccctggcctaccgcctgcccctggacaaggggacggaggccctgaagggaatgaccagggagggagtcctgctgaaagaactggtggaggaacatggaaacttctaatcatctgacggaatcctggagccagccttggcagtctgtcctgtccagccagctctggaggctggagcacctgtactggatagaaaacaaggccgggcagctccagcgcttctccctgaacagggcgcagcggcggctgcatgagcggctgtggtacaggaacgacatcctgaaggcgcgccaactgggcatttccacgtatgtggccatgctgatgctggacatgagcctgttccggtctaatttccattgcggcattattgataagagcctgccggacgcccagcagaagcttgccaagctgcgtttcgcctgggaccatctggattacgtgccgcccgacccttccgcgatggatgtggccctggcccggctgggagagagaatcaagagcctgtccggcgtggagaagaagggggaatggcggccctgcacgtctgcgcgcaaccgcctggctttcgccaacgggagcgacgtgcgcgtggggacgaacctgcgcgggggcaccatgcagttcctgcacgtttccgagctggcgcatgtttccgtgcacgccccgtggcgtgccagggaaatccgcacgggggcgatcaatacggtgccccccggcggctttatcctgaaggagagcacccatgagggcggccggtacggcgtgaattacgaactgacgcgccaggccatggagaacatgggcaagagcgagctttctcccctggatttccggttcttcttctttagctggtttgaccaggaggagtacacgttgccggggcgcggcagatggagccgggaactggacgagtacttcctttccctggaacgggaaaccggagtggcgctggatgcgggccagaaaaggtggtacgcccggatggcccgcgtgatggggacggccatgaagcaggagtacccgggaacgccgcaggaagctttctgcaccggggaggaggggagcatttacggcagccgcatcatggccctgcgggaacgcggacgcgtggggacggagtttgcggcggacccggacgcccccaccttcacggcgtgggacctggggttgagcgatcatacggccatctggcttgtgcaggtgatgggggacagcttccactggctggaccattacgccgccaaccagcagcccctggcccattatgtggaaaaaatgaaggaatgggagaaggcgcacggcgtggcggtaacggcccatctgctgccccacgacgccgcgcggagggatgcccacggcacttcctacgtggagaacatggcacgtctgggattggcgaacgtgcgcgtcgttcccaggaccacggacgtctggcgcggcatcaatacgctgcgggaactgctggagcgcagcttcttccatgcccgcacccaggaaagggtgcgcggcgtgcgcggagaggaggagcccggcggcgtggaacatctggaattgtacaggtccaggccgccgggtgcgggcggttccgtggtggagagccccgtgcatgacggacattcccatacggcggatgccgcgcgcacatttgcggaggcgtggtcccatggactgctccacgggcccgggaatgaccggggccgcggcaggcgcgcacggatgtggtgatggaaggaaaacggggccgggaagagatttttttgattgatggttgacagttttgtcaaaaagcggttcctttttccggctttccgttgtctaacgcagtgatgcgactccccgagatgaagttaccccttttccatctgctggttccctgcctgtgcgttccgttcctgttttcctcctgcggcaccacgggtgggggctcttccccttcttcctcttccaatgttccggtggaggaaatgaccgggtattttgaggaaagcggaaccattccgggacacctgctcaagtgggaggacgatccgtccctgcccggaaagctcctggtcgtagtggacaagaagaagcagatgatgtacgtgtaccgcgggacgcaccgcatcgcgtatgcgcccatcagttccggaaggagttccggcatgacgccctccggctatttccgcatcgcctccaaggatgcggaccaccattcctattacggcgcgttcatcaatgccgccggggagctgcgggacggggatatacggaaggatgccgcacggcccggagaaaggtttgaaccggccaagatgccctatttcatgagggtgaacggggctgtaggcattcatgaggggtatctgcccggccgcccgtcctcccacgggtgcatccgcatcccccatctggtggcgaagaacctgtttgaagtggctcccgtgggaacccgcgtgattgtcagggacggggactggaatattcacgagcttcagaaaaagccgtccggtattttcagaacggtgcataagccgtccgccccgcgggctggcgcaaattcagcttcctccgggaagaaggagcttgtaaagtcagaggcgtccgtagagaaggatgccgctgccatgccgcctgttggagaacaggaaaatgcgccgctgccttcttccggcgcggacgccgtgaccccctcttcatcccatggactcgaaggactggaataacatgctggccgggcgtttgtaccatgcccaggattccgaattgacagccaggcgccttcgggcgcgcaagctcgtcttccgctacaaccagtccgccccggaggaggaagaactgcgccgggaattggcgcgggagctcttcggtggcatgggggaaaactgctatctggaacctccgctgcggtgtgactatggaacgaatatccggctgggggatcgcgtatatgtcaacttcaacctggtggtgctggactgtgccgccgtcacgatcggcagtgacgtgctgataggccccaatgtggggatttacaccgccacgcaccccgtggacccggggctgaggcgggacggtctggaatttgcgcttcccgtcaccattgaggacggggtgtggataggcggccatacggccattggcccgggcgtgcgcatcgggcgcaattccgtgataggcgcgggaagcgtggtgacgaaggacattcccgccaatgtggtggctgtgggaaacccctgccgcgtgatgcggcccattacggaaaaggaccgcgaggcctggggtgcggtggaaaatggtggggaggccgctaccgcaggaacggaggcaaattctcctgcatgatgaaatttgaattgcttttggggacggatggtgcatagttggcgccctcacagtgtcgattagccgctgccacgagctaaatacattcaaagaaaacacttatgagtaacgaaatcaatttgcaggaattcaagatgcatgaaaaggattccggtagctccagctaccagatcgcccacctgacccagcgcatcgcccacctgaccgaccacctgagcacgaacaagcacgatgtttcttcccgccgcgggttgttgaagatggtggctctgcgccgcaagcttcttgattacgtcaagcgtgaagatctggcccagtatcagagcctgattcagcgtcttggccttcgccgctaaacggcggaacatattcccgtttgattcggccgttgcggttttccgcagcggtcgttttttttgccgcgggggaagggcggttccccgtatttttgttccggaagaggccttgacctttaaaaaatgtctgttagcctgacagacatctatggaacaaatgacacggatccagcagaacacgctgagaaaaatcgtggaggcggccattgaactgatgagtgaaaaagggttccaccgcgtcagcgttcaggaagtagggaaaaaggccggtatttgtgaaaagaccgtcttccgctactttgccaccaaaaagtccctgctggatgaaatcatccggtaccgggaatatgccagcgaactgaaaagggagttcgaaaacaggaaaacgtgggacctggcgcatgacctgaaactggctgcgcgcctgtacttccaggcgacgaaggccaaaaggaacgccttccgggcctacttgagcgcgctggactccgtggatacgaacggagatgattttttgcgcgacccgcgggagcttcattccttcctgtgtgactacatgggcgccatgcaggaaaaaggaaaggtcagagagggggatgtggggctcatggtgcgcgcctttgtcaataccctgcacggctacatgctgatgtactgcctgaatgatgacagcaaggcgtggcaggacaaggtggcctccatgaagctgaccattggcctgttcattcagggattttcccggcaatgcacatcctgcggcgcatgagcaagcatttgaaggctatatcactgggcagcatggccctggcggcggtgggagccatcggctggggagtctggcatttccgggagagccgcaccatgaaaacggacgactgccgcgtggaggcgagcatcgtttccgtgggatcaaagctggcggagcgcgtcaccagcgtggatgtggaggaaggggaaaccgtccgccgcgggcagacgcttgcccatctggacagccgcaccatgcaggcgcgcctgatggccgcgcgttcccgcgtcaagctgatgcaggccaggcatgacgagatgctggcgggcttccgtccgcaggaaatcgagtcccagcgggccaggacggcccaggcctccgccagcctggaacatgcgcggcgtgattacgagcgcattgaaaagctggtgagggagcaggcaggcatcagctccgcggaccgggacgccgtacgggccacctacctggcggcgcaggcgctggagaaggcggagcaggagaatctggccctcaagctggaaggttaccgcgaggaggaaaaaagatccgcccaggcccagctggaagccgcacgggcggaactggaggagttggaagtgctgtgcggggaatgcgtggttaaatcccccgtggacggcgtggtggcccgcaagctggtgaacggcggggagatggtcagttccggccagaagctattttctattgtggacggcggggacatctggctcaacgtccgcgtggaggaaaccaagatagggcgcatccggcagggtcaggacgtgcagttcacgctggacggttatgacggcagggttttccacggcacggtttatgaaataggggcggccacctatgcgacattctccctgatttccacggagaacgtcagcggttacttcaccaaggtcatgcagcgctttcccgtcaaggtgagcctgccgaagccggaggacggcgtagtattccgcccgggaatgcagggaaaggtttccattgatttttaaggaaaaagtatgagcggtccggttatgcaaacaatggttccggcgtggaaacggcgcctgctgacggggatggcctgcgcgtgcacgatgctgacgtttctgaatatgggctgcatcacggcggccacgccggatttgtcgggcacatttgtggtgggcaccctggatgtttcctggtcgggtgcggcgtgcccgctgggaactgccctctcctttaccatggcggcgtatctgtgggcgcgcatcggactgagaaggtccctgcgcacggccctgctgatcatgctggccggaaccttgctgggactggcggcggaccatttcttcctcatgattgcggcccgcttccttcaggggtcaggaggcggcctggcgctggtgtacggaacggggctggtgaatgccgccctgcctccggagcgccgcagcctggcgatgggcgtgaagctttgttccattggcctggcatcctgtgccagcccggtagtggggtgcctgctggtgcagtactggcactggcgggggctgttcgtcattgtgggcgcagcggcagccgtgctggccgtgctgacgacgctttacgttcccgaccagaagattcccaagggaggaaaatttgactggttttcctttctggcggtggggatgggatgcgtgtgcatgctgatggtgcttatttacggggagacggacggctggacggcgcccggcgtgctggcctggatgtacggcggattttgttcctttgccctggccttcatttcctgcatgacccaccgcacccccctgctggacgtccgcgtgctgggcaactggcggttcctgtgcggcctgctggcgtccctgtgcaacatcttctgcatttgctgggtgcgggtgggcacggtgcagttcatgcgcaatgtcatgaattatgaaccggtgggcattgcctatgtgttcatggttctggtggccggattttgcggcggcgcggtgctggtgctccccctgatgcagaagggcaggctggccctgcgggtgggcatgatggcggggctgctggcgctgggcgcctccgccttcttcctgtcccggctggacgcgggctgctcctggctggacgtggcgtggcccctggggctgttcggaatcggttatgccttctgtttgaatacggctacgccgcttgccctgagaggggtggaggggcgttcctccgccgcttcctcccggacgctgaacaccgtgcgctacatcttcatttccctgtacgtcagcagcgtgagcacggtattggcccatatgaaaacggggttccgcttcagcatggcggagcaggtaagggacgattccccgggaacggcgcatacgcttgacatgtggcagcggcactttgcggaaaccggcggcacggcacaggaaatccatgcatccgtggatgcggtgctgcaaaaggccgtggcgctccagagccaggtgttctccgtggataccttttatctttgcaccgtgatcgtgggggcggcgggagtcctgtttgccctgttctgcctgaaatccagcccggaaaggaaggccgcttcatgaaacgtctgatgcttcttctcatggccgcgctgctggcttcctgcggcagtcccgccgtatttgaaaggcccgtcatggaaatgccggagggaacggcccggacttctcccgtaggggccgggtggtggcgcattttcaatgaccgtgcgctggaccgtctggaagaaaaggccgtggctcataaccgcgatcttgtccgcgcgtccgccctggtggaccaggcctccgccctggcggcgcagacgggcgccgccatgctgccccgggcggaactggaagccggagccagcagcgaggaattgtccgaaggtgaacgctatatgaacaacctgccggaccgggcgagggatttgtggtccatgtccggcgtgctctcctatgaagtggacctgtggggaaagctgcgggcgcgcacggaagccgcccgggcggagctgctggcttcttccgccgcccgggatgcggtttatctgcggctgacggcggaagtggcctccgcctacatcaatgtgcgcacgtgggaggaaaaatgccttatcatccgccgcgtccacgcctcctatgaacagacctgcgccatgtatgaaaaaagatttgtgcaggggcagtacccggagcttgccctgcgccgcgtccaggcggagcgctccaaaacgctggcccagctcaggctgtcggaaaacgaactgtcccgtgctgaaagcgtgctgtccgtgctggtgggggacagtcccaggcaggtgatgaagggcggaaggcccggcgggggtaatgccgccctgctggcttctcctccggtcattccggcgcggctccctggtgacatgatcgaacgccgtccggatatctgggagctggaatcccggctgaaagccgccttttacggaagggaggcggcgcggaaggacaggttcccgtccctggtgctgacgggggaactggggcaggtcagcacccagttgaacgaactgctgaaccagtcttccagaagttatgaattgggagcgggcattctccagaccctgtttgacggggggaggaagcgagccgccgtacgcgccgcggatgctgaatgcgccgccgtccaggccgcgtatgagcaggctgtgctgaacgccttccgggaaatcagggatgccctggtggaacgccgcaaaagtacggaggtttacgaagctacgcttgatgaagtgaactgcctgcgccgcagctgggacattgcgtccaggcagtatgaggccgggtatgtggggctgatggatgccctggatacgcacaggagcctgctgagcggggagctggacatggcggatgccgcgcagatgcggctgaatgccgtcgtcaaattctgcaaggctctcggcggcggatggctgcggcgccccggttccgcatgagggacggttcttgccgccggggatgcccccatctgctccggaggaagttttccggcagggaagggaggggatgtccattcccggcaggtggcggggaaaagcacggaacagcggggctatcaaactatttgcttgcattctccttgacagggcttatgctggcatccgacgttcggggactcgtttcccggtgcgtttctgtcgggcatgccttgagaaattttcggattttcacaggctgtcaagccggtaagactgggccggagcgtttgatccatctgggatgtgcgccctgccgcgcggacagtgttcccctttatttttgggaaaaggctgctgcggataacactcttcctgaggcactgcccgtacctgacgccattcaggcttcccgcccggagccggtctgaatgggctgatgaggctgcgggtgactgaaagacaagaaatataatgagcatacattcagttgaatgcaacgttggtacgaatcccatcacgattgaaaccggaaaaatggcccgtctggcagacggcgcggttgtcgtccgcagcggcgataccgtcgttctcgtgaccgtggtgagcgccaccaaagtcaaggaaggccagaccttcttccccctgtccgtggaatacaaggaaaaggccgctgccgcgggcatgttccccggcggctacttcaagcgtgaaggccgccccacggaaaaggaaatcctgacgtgccgcatgacggaccgccccctgcgcccgatgttccccaagggatacttctatgatacgcaggtgatcacccttctgctctccgccgatggtgaaaatgaaccggacattctgagcatcaacggcgcttccgccgcctgcgtcgtttccgacctcccctttgccgaacccgtgggtgccgtccgcgtgggccgtgttgacggccagttcatcatcaacccgaccaactcccagcgtgaaaacagccagcttgacctggtgtttgccgggacgaaggaccacgtgatcatgattgaaggttccgccaacgaactgccggaagaagacttcatcgccgctctgcgcctggctcaggaaaacgtgaaggtcctttgcgaaaagcaggaagagctccgcgctgtctgcggcaaggaaaagcgttcctacgaactctgccttgccaagccggaactgctggaaatcggctatgaaatcgccggtgaccgcattgaagacgccatctatgccgcctccaaggtggaacgccagaagaaggtaggcgccctgcgcgacgaagtggaagccgccatcaaggaacgccatccggaagctaccgattttgacgtggagcaggtctttgaatacattcagaagaaggccttccgcatctccatcatggacaaggacaagcgcgccgacggccgcgccctcaaggaactgcgccccctgaccgcggaaatcaacgtgctgccctccgtggtgcacggctccgcgatgttcgcacgcggtgaaaccatgtccctctgcctggcgacgctcgctccgatggaagaacgccagtacatggacaactacacgggcagcgtgaatgaaaagcgcttcatcctgcactacaacttcccgcccttctccgtgggcgataccggtcgtttcggcggtcagaaccgtcgtgaaatcggccatggcgccctggcggaacgttccatcgctccggttgtcccgagtgaacaggaattcccgtacgccatccgcatttcttctgaaatcatggaatccaacggttccacctccatggcttccgtctgcgcgggcacgatgtccctgctggcggccggcgtgcccctcaagcgccccgtggcgggcatttccgtgggcttggtgacggaacagaatgaccagcatgaaatcaccacgtacaagacccttctggacatcatcggttccgaagacttctacggtgacatggacttcaagctttgcggcacgtctgaaggcgtgacgggctaccagctggacctcaagctgcccggcatccccctctccattctggaagaagccatccacgtggcgaaggccggacgcacggacgtgctgaaagtcatgaatgacgccattgcggctccggcccagatgagcccgaatgccccccgcattgagaccaccaagattcccgccgaccgcattggcgagctgattggccccggcggcaagaacatcaaggccatccaggctgaatccggcgccgacatcaacattgaggaagacggcaccgtgcacatctacgcctccaagcaggaaggcctggaccgtgcgctggaactggtcacccgcatgttcaagaccattgaaatcggtgaactgtacaccggcaagatcgtttccacgaccacctttggcgcgttcatggaagtgcttcccggcaaggacggcctgattcacatctccgagctggccgaaggccgcaccgccaagacggaagacgtcgtcagcgtgggagacgtggtgactgccaagtgcatcggcatcgacgacaagggccgtgtgaagatgtccgtgcgcgccgctctgcgcgacgccaaggcagctgaagcggaagccgccggcatcacggaataacggtttttccgttgaacctttaaacttccagccccgtttccggtttgttccgggagcggggctgtttgattgtttaagggggggattgactgcaagaagggaagggctgttcgcgtgatcttccggatgtttttttgctgtttcagggaggagccgggaaaaatcaggcagccaaggagaacaggctgcggaagaaaccgggaggcggttttgtttttgcagcggtatgtttctggaccgcgggctggattcgcgcctgcgttattgccgttccttccgtaagaagatttttttgccgtacggcattcctgcgggacgtcagggatgttcctttttctgcacggacgccgttttcacttcagcagaaggaggcgtgcacagaaagcggcccagcagatccagcgtggctttcacgtccttcaggtccgccagctcccggggagaatgcatgtagcggatagggggccccagaaaagcggcgtggccgccgtaaagcttgacggggacgaaattggccatgccgggcgggaaagcggcgtccttctggaacggaatcccgtgttcttccgccagttggagcagttgggcagtgataggctggtaaaaaattttgtcatgagtaaaaatgacggggccttcccccatagcctggcggctcaatcgctcgttttcttcacggggcggcaggtcgtccagctggacggtatccagcgtgcagtcaataacaatagccagtttgggacggttcctgccacaatacgccgtggctcctgccagccctgtttcttcctgggaggaggaaaggagcgtgacgtggtatttcaggtcttttttgtgccgggacaggaaggaggccagctccatcagcatgaaggaattgaggcggcagtccaggccgtgggccatcaggcgcgtgccgtgcagcaattccggcttggtggagggaacgccgcgccggccgacgctcaagcccatttcccgtgcttcctccgcgctggatgcccctgcgtcaaacaggatgtattctcctcctgccggaaggggctcgcggttcagccaccagccgggaaccgccccggcaaaggcggtgacggggccgtgttccccgtcaaaacggtaagggcaggaaagcatggactggaagtccggaaagccgacgggccttactttcagaaagccggacggagtgatgcctgcaatgacaacgcccacttcgtcggcatgggcgtctatcagcaattccggtgcgtccgggtccgggctgcggaacgtagcccaggcattttgatgcgcgtccgtgccggaactgtccgccaggggcgccacgtgcttgagccagaattgctggaggggggcttccgctccggaagtggagggaatgtccagcagggaagccagacgttccatggactggccgctgaaaggcggctgcgtttccggcatggaggccacgcaaaggttgaaaagaagcagtggaagcagcaaaaagcggatagaaggcattccccagcctatcatggaagaagggcgggaagcaatgctggaggaatgaagtacgcggtccgcatggcagatttttttgtttcccgttcttgacaggatttttttggttcctatgatgcggatgcccgttgcgttttacggacacccccgccatacatgattctttttatcatcttcgttattcttttcctgattctggtcaacgccttttacgttgccgcagaattcgcagcggtgagcgtgcgccgcaacatgatccgggagatggcggaaggcggcagcaaggtggctgcccatttgctgaggattttggaaaacacgaaggaactggaccgctacattgcggcctgccagttcggcattaccatttccagcctgattctgggtgcgtacggccaggtggaactgtccgcctacctgctccctctgtttgaacggtttggcggcatggattccgtgatggccaattccgtagccgccattgtagtgctggtcgtcctgacggtcctgcaggtgattctgggggaactgatgcccaagtccctggcgctgcagtttcccaagcaggcggccctgtacacgtattaccccatgcgctggacgctaaccttcttcgcatggttcattgacttcctgaacggaagcggtcttctgctgcttaaactgttccgtctgccccccggaggccaccagcacatccactcccagcaggagatcaacatgctgctggatgaaagccaccagggcggcatgctggaggaggatgagcatgaacggctgcacagcgcgctttccctggcggaacgtacggtggagcagatcatgattccccgtttccagctcgtctgcctggatgtggacgctacccaggaggatattctgaacatgattgcggacaggccccatacccatattccggtgtatgaaggaaaccgggaggccgtcatcggcatgctgcacatcaaggacatggtggccgcgtatgcggaaaagggtgttctgccccccctgcgctccatgctgcggcaggtgccgtgcgtgatggagatgcagacggtggagatgctgatgtgccgtctgcgggaggacaaggccaaggaagcctttgtgctggatgagtacggcaagttcgtggggctggtgacgctggaacggctgctgggtgaaatggtgggggatattgatgaggaattcatccgctccggggaaaaggtggaatacctgccggacggttccgtgcgcattcccggcatgatgcgcgcccataaggcggaatgcctggtgcccttcctgatgaacggcgccaccacagtgggcggttgcgtgatcaagcacatgtcctgcattccgaaggagggggaccgcctgattattgcggggcgcgttctggtggtggaaaagatggaccacaaccgcgtttcctccatccttctgttgcctccggagaaaaaggaggatgaacctgccatggaaagcggggtggaatcatgatgacgatttttattattctgctgctgattgtactgaacggcctgtttgtggccgcggaatttgcgctacttggcgcgccccgcgcggctcttgagcaaatgggggcgtccggcaacatggtggcgcgccgtgtttcccagatattgaaaacgccccgtttgcaggaccgctacattgccacggcccagctcggcatcacattcgccagcctggggctgggcatgtacggggagcatgccgtggccggatggctccacgaatggctggcccagtacggctgggcctcctggctggtggcgcatggcgcagccagcgttctgtccgtagcggtgctgacgtacctgcacatcgtgctcggggaaatggtgcccaaggctctttccctccagtacgccacgaagctctgcctcatcattacgatgcccatgtacgtgattcagctctgcctgtatccgctggtggtgggcatgaacaccctgggcaacttcttcctgaggctgctgggcgtggacaggaatgaatccaaatcccattaccattctgcggaagaacttcagtacatcattgaggaaagccatgaaaacggcgccctgccgcaggaatccggccgcatcatggacggcctgtttgacctggaagacctgtatgttcaccaggtcatgactccgcgcgtcaggatagacgccattccggaaagagctgggcatgagcagataagggaaatcgtgcgccgcacccgccgtacccgctaccctgtctaccgcggggacctggaccacgtggtgggcatggtgcatgcccgtgacctgttccgcatcatgctgcgcgggaaggccctgacgtccgaatacatccacgccattcccaaggtgcccaagacggtgaagtttgacaacgtggtggagatcatgaggaaggacaatgtgcgccttgccatcattctggacgagcatgggggaacctccggcctgctgaccctgacggacgtgttttccgaggtgatgggctgggaccgcggccgcatcagagtattgacagacctgccgcgggacgcagtgggcttctcctgcgacgtgtccggactcgcccgtattgaggagctgggggaagccatggacatggacttgcagagtgaggaaatcgatactgtgggcggcctgattctcaatctgctggaagctccggcggaggaaggggacaccgtgggctaccgcggcctggaattcaaggtgacccggacggagaacggcggtgtggaacgctgcaccgtaacccggattactccactgatgcgggaggaagctttggaagaagaggaataatccgcgggactcaggcgggaatgcgccggaaccgcgttgctttgtgcaaaagttccttggtggagcgcgtatgatatggcagaatattttccgtcatgtcccaacctgagtccgccgatgcttccatgaaacgcccctccatgaaaaagtgggttgttctccttgttgttcttggggcgctgatcggggtaggcacgatgatgaaggcatggatggaccggcgttccggcgcggaggcccagccggccgttttctcaggcggcagcgagcactgggaccagaatgaagttcccatctccatgcagtgcggggcttgccatgaaaaggaattccggcagtgggccggatcggatcacgcctgggcattccgcaagctgggggaccagtgggaatctgaggcgttccataacatgaagctgaacgcccacggcagcattcttcaattctccacaaatgcagaggggcgcatggtgcatgacggccagtcctcaacctcctggcgcgcggactgggccacggggagaatccccctggtgcagtacctggttcccgccagggacggcggttatcataccctgagcgccgcgtgggacgtgaaccgcaaggaatggtttgatatctttggcaaggatgcccggcaaccaggggactgggggcactggacgggccgcggcatgaactggaacacgcagtgcgcgtggtgccacatgtccctgttccataaaaattatgatccggtcaaggaccgctatgcctccacctggacggaacccggcgtgacttgcatccagtgccacggccccttgctggacaagccggaggaggggacgggatgcatgatttccaccagggacaagctgacgccgcagcagattcatgacaactgcgcttcctgccacgcccggcgggatgaattcgatcacgattttgccgttggcgaccgttttgacaaccatttccagctcgtgcttcccgtacagcccggcgttttctggcccaacggcatgcagagggatgaggattattgcgaaaccgggctgcgcctgagccgcatgggcaaggcgggcgtcacctgcctggactgccatgacccgcatacgggaacgctgaagcttccgcaggaggataacacgctctgcctgcggtgccacggcaccggggaggcggtaaacggcgtaaaagcccccgtcattgacatggccaggcatacgccgtgcccgcagtccagcatgggcgcccgctgtgtggaatgccacatgccggaaagcctgtacatggcccgcgacccgcgcagggaccattccttcaattctcccgatcccctcctgagcgtggagctgggcattccgaatgcctgtaccatgtgccaccgggaaaagagtaatgaatgggccgcgcaagcggtggaaaaatattacggggccaagcccaagatggcgcagtacagggaccgcacccgggccgtgcagcgtgcctatgaagggcgggaggatgtgctgcccctcctgatggaatgtttcaagcgggaggaagtgggcgcatggcgcgcgacgctgctggatctgatggatgcctgggcgcatgaacctgccgttcaggagctggctgcagcggcggtcaaggatccggactccctgacgcgcgccgccgccgccaaggtgatgggccgtgcgggcaatcccgccgcgggcaaactgctcaatgatcccttcaaggtagtgcgcctgcaggcggagtgggccctccgggattccctgccgccggacagccccggcatgaaggagctgaccgccgccgccctgcaccaggcggaccagccgtccggggcgatgaagctggcccagatagccatcagccgcaaggatgcgaaggcggcagaacagtggtttgccaaggctttgaaatgggatgccacctcttccgtggtgcaccgggattatgccgttttcctggcctcccagggccgcagcggggaggcggtggaccagatgagggaggccgtgcggctggctccgaaggatgccaatctgtggtatctgctgggcctgggccagattgaaaacaacgatgagccgggcgcgctggaatcctttaatgaagctctgaaaatagaaccctccttcatccgtgccctgttcaaccgcgccctgctgaatgaaaaggtgggtcggttggaacaggctcttcaggacctggaaaactgttcctccctggacaaggagaatgcggatattccgttcacgctggcggtgatgctttaccgcaacggacggtaccgtgacgccgccgccgccgccgcggaagccctgcgccgcgatcctgggcacgcgcaggcaaggcagattttggaatcagcttctcgacatggaaggtaagaagtagtatatcagcgttatgcgcatgaaattttccccctggcgtattctgctggtgtccgcattcgtagcgggttcctccttctgttttgcggacgctcccggagcgtcggaggatccgtccctccgcatttggacgaataaaagcacgggcagtaccgtggaggcacgtcctattgccttgaacatgaagactgtcaagctggtaactacggccaaaaagcccatcaccatgccgttggaaaagctttccgaggaagaccgcgcgtggctggaggaacacaaggaagtgataggcaagcctgttgcggaatggtcctccgtgccgtccggccccgtggcggaggaaatgaaggggaaaacctacatgctggaaaacggcaagcttgaaaagaaggacgggaagctgaatcccgggcatttcatcctgtatttcagcgcaagctggtgcggcccgtgctgccggaatgcgccccacagcgtggaggcctacaacaaggcggtgaaggacaacccggatgtggaagtgatcatgtgcaatctggaccagaacctggaagccgcccagaaatgggccgccgccaacaacatgccctggcccatcctgctgaggcaggatttgacggagcttgccaagaaggtggccccgcgcggcatccctacgatgattctggtggataaggacggcaagcccatccagtcttcccaggacatggaacagttggtgaaagccgctggttcaagccgttcctcccgctaggcggcagcaccgtttgatcttttgaaacgatggcttccatccgcaaatcccagtcggaccgctctgcggaaaccagcggtaaaattctccgtgccgcgcagaaactttttgccctcaggggatttgacggagtgaccatgagggcgattgcctctgaagcaggggtgaacctggcctccattgtttactactttgaaaacaaggaaggactgtacttggccgttttcaggcaatatgcggaacccctgatggaggagcgcatgaaaatgctgaaagaggcggaccttcatccgtccctcagggcgtatgcccgtgccttcattgagcccgctttccgtttgctgctggataaaaacctgggtggtccggatcacgcgcgcctgctgtggcggctgccccaggaaccggaatacctgggaaggaagatttacgatgaattctatgctccgctcatccgggagatgacgttgagggttcggcgattctgcccatgggacgatgagctttccatatcctggcacatacatatcatgagttccattttccatgccacgctggggaaatacgtcacacggctggaacttcatgacaaggagccgtggatgaaggatcaggaccgcatcctgcaaatgattgtggatacggcggtcctgctgatttcccgtcctgctctttctccggagggagaggaaagacaggggtaaccgcagaagtggaatgcaatacccgggaaggcgcgtctttcctcacgcttctcccagtctttttataagcgccgcgaccgtttccgttatatccgggtgtgtaagcagccaggaaacgatgacgaccctgcttgctcccgcctccagaacggagggcagcgtgtttccattaatgcctccgatgcagaagacgggaaactcttccggcaattgccgccgcacgcctgcaatgtcttccaggccgatcgccggccttcccggcttggtgcccgtgggaaacaaggggccgaatccgatgtagtccgcctgctcccggaacgcgcccagagcctgttccgggctgtgcgtggaacgcccgatgatggcgtccgcccccagcatggcccgcacgggagccagttccccgtcgtcctggcccagatggacgccgtccgcccctgtgctcagggcaatttcaggatagtcgttgatgatgaaaagacagccgtattcgcggcacagcggggcaagccggctacccatgcgcgcgatatgttccggatcatggtttttcgccctgagctggaggatgcccagaccgcccgccagcaatttttccgtaacggagattaattgatgttcagcggtatatcccatatccgcgatgccgtatagccggcaggacgagaggcgttccttcctgttcatggcagggaattgtaccggataaaatcatcccggcaagacgcttcccattcttgaccctaaaggagggtgtgatacactccccgcatcgtgtcacccgccttatattccgccgctaaaagtgtactgttccagatgaatccggaaaccgcccacaaagtgaccttgtgggggctgcgcctggcagaaaagatgcgcgtactgccccttctgatgggggaggttccttccgaccccgtggaaatcctggggatgaaattccccaaccgtgtgggtctcgccgccggaatggacaaggaggcggatacggtgaacgccttcggccaggccgggtttggctttgtggaagtaggcacgctgacgccgcggccgcagccgggcaatgacaaaccccgcctgttccgcctgattccccagcaggccattatcaaccggatgggattcaacaatgaaggcattgccgccggagtggagaacatccgctccgccacccgttttcatggcgtcctgggagttaacatcggaaaaaacaaggtgacgcccaatgaagatgcggcccaggactacctgacctgcctgcgtgcggcatggcccgtggcggattacattgccatcaacttctcttctcccaacacgcccggactgcgcgaccttcaggcggccgaacccgccgcgcgcctgctggcatccctgaaatcggagcagtccaacctggctgtggaaaccggacgcaatgtgcccattttcatgaaggtggcgccggatgtgacggatgagcaaattgcggaactcagccgcgttttcctggatgaaggcctggacggcctcattgccacgaacaccacgctttcccgggccggggtggaagccagcccgcgccgtgaagaagccggcggcctgtccggcgcgccgttgacggcgcggtctacggaagtcattggagcgttcgcctccgaattgaaggggcgcatcccgatcattggcgtaggcggcatcatgagaggcgcggacgccgtcgcgaaaatcaaggccggggccagcctggtgcaactctacacagggttcatttaccgcgggccggacctcatccgggaatgcgtggaagccatgaaggctgaatgccccgttaactcctgattctccttattcactgcctacaggtttcattcatgcccggttccttcgtacatcttcacaatcacacggaatactctctgctggacggcgcagtccatatcaaggacctcattgccgaatgttcccgcatgggaatgccggccgtagccatcacggaccacggcaacctcttcggggccattgagctggtcatggaggcgaacagccttaacaaatccgtggccgcctggaacaaggaacatccggaaggaccgcagaagcaggaggtgaagcccatcttcggctgcgaggtgtacctttcccccacgcccatcggcgtgaaaaaacagcttcccgggcgccgcaaatatacgcacctgcttttgctggcggaaaatgaaaccggctggcagaacctggtcaagctggtatcccggtcccatctggaaggtttttattacaagccccgcgtggacatggaaaccctgcgggaattccatgaaggtcttatttgctgtacggcgtgccttgccgggccgctgaacgaatggctgctcaatgaccagcctgaaaaggcggaggaagccctcctggcgctgaaggatatcttcggggacgacaacatttttgtggagcttcaggaccatggcatggaggagcagaaaaaatgcctgccggagctggtgcgcatcgcccgcaagaccaatacccccattctagctactaacgacgtgcacttcctccggaaggaggaccacgatatgcacgacgtgctgatctgcatcggcaccaacgaaaagctggcttctcccaagcgcatgcgctactccacggaagtctacctgaaatcccccgaggaaatgagggaggtgttcaaggactatccggacgccgtggaaaacacgctgaaaatcgcggaacggtgcaacgtcaccatcaagctggactccgccagtacggaaaaatacccggaattcggcactccggacggctccacgcgtgaggattacctgcgcaaggtatgctatgaaggactggaggagcggtacggcaaggaacgcgtggctaaggacaaggaactccgcgaccgcctggattatgagctggggattatcaaccagttgaaattcccctcctacttcctgattacggcggatttcatcaactgggcgaaggaccatgacattcccgtggggcccggccgcggttccgccgccggttccctggtggcgtatgccatgaagatcacgaacatcgaccccctgcggttcgggctgatctttgaacgtttcctgaacccggagcgcgtcagccctccggatatcgacattgacttctgccagacgcgccgtccggaggtgattgactatgtgcggcagaaatacggggagcgcgccgtgtcccacatcatcacgtacggcaccatgggcgccaagtccgtgctcagggacgtggcccgcgtgatggacatgtcctacgcggatggagaccgcatttccaagctgattgaacccggtcccaaggtaaccctccagtccagctacaagagcagtgaggaactgcgggagctgatcgcctccgatgaaggatacgcggagctctggggttatgcgacgcgcctggaagggctgatccgcaacgtgggcgtgcacgcggcgggcgtcgtgattggtgaccgtccgctggacgagcatgtggcgctcacccgtgacgacctgtctgatcctcatgcagccgtcgtcgcccagtgcgacatgagcgcgatttatgaagtggggctcttgaaaatggacttcctgggtctgaaaaccctgaccgtcatgcatgatgcggaggaatacgcccgctggcgcgtgccggacttcaagctggattccgtgcccctggatgaccgggaaacgctggacctgctgaacaggggggacacgatgggcgtattccagctggaatccggcggcatggtggatacctgccggcgctacggcatccagaagattgaagacatcattgacttgctggccctttaccgcccgggagccatgcagttcatggatgaaatgatcgaggtcaagaaggggctgcgccaggtggtgtatgaacacccgctgctggaacaggtcagcggagagacctacggcgtgatgatttaccaggaacaggttcaggcggcggccaagctgctggcgggctacacgctcggcggggccgacctgctgaggcgcgccatgggcaagaaggaccctgcaaaaatggccaaggaaaaggcccacttcgtggaagggtgctggaaaaccaaccagattgatgaaaagacggctacggccatctttgacaagattgaaaaattcgccgggtacggctttaacaaatcccactccgcctgttacggccacatttcctactggacggcctacctcaaggcacacttcccggtggaattcctctgcggcctgatgtccaatgaagcgaacaacgacaagatcggcgtgttcattcaggaagccaaccgcatgggcattgaaatcctgccccccaacgtgaacaaatccatgctcaaattcactccggaggaaacgccttccgggaagctggccgtgcgctacggactggcggccatcaagaatgtgggggaaggagccatgcagattcttctggaggaaagggaaagaaacggggaattcaccagcatggaggacatctgcaacaggctggattccaaatccgtcaacaagaagattctggaatccctgattcgcgcgggagcgctggactggacgctggaaccgcgctgcgccctgtttgagcgggtggacctggccctcagcggcgcatcccaggtgcacaaggacaaggccctggggcagggcgccctgtttgacatgacttttgaagctcccagggtgaaggatgagcctgctgttctggaatggtccaaggagcagcgcatgggggatgaaaaggacctgttgggcgcctacttctgcggccatccgctggactccatgcgcggcgtcattgatgcggaaaaatacacccgcatcggtctcattgacgcgctggagtcgcacgaactcaagcagaagcaccagatcgccggcatggtgcgctccgtcatccccaagatcagcaaggcaggcaggaaattcgccatcctcacactggaagactttaccggcagcattgaagtgctgctgtggtcggatgtctatgaaaaggccctggaaatggaaggcggcctggaaccgggcgtcttcgtctccgtgcgcgccaacatccgggaggatgaccgcacttccgccaagagcgtggccgcgcagagcgtggacccgctgggaggcaggaggcgcaagtccaaggccggggaccagggccctctgaatatcattgtcagccccctgcgccacacgaggaaaaatctggagcagatacgggacatcctgaaaaggtaccccggtcgttccaaggtcaatctcacgatcaaggacagcctgggccatagtcaaatcctggagctggacgaacggttccgcgtgaaccgctgtccggagctggaaacggaactttccatgtacaactagcgccatgccgggaggaaaactgctcttgccggaatcggaacggctggcattccgggcgtggggggaaaaggactggcccttttttgcggccatgaacgccaatccccgggtgatgcgtttcttccccgccgtcatgacggaggaggaatcccgcgccatgtggaaccgcctgcgggcggaactggatgaaaagggttacggggtgtacgccgtagagttgaaatcttccggctccctcatcggccttcttggttttcattgggcggattttaaagcggacttcacgccttgtgtggaaataggctggcggcttgtgccggaagcctgggggcatggctacgccacggaaggggccacggcttgtttggagcatggttttgccaggttgggccttgaccgggtgtattccttcaccgcctgcgtgaatcttccttcccaggccgtgatgcagcgtgccggaatgaggaagacggcggaattcaaccatcccaaagtagctccggattccgtcctgtatccgcatgtgctgtatgtaagggaagcttcccacgcatgattccatgacggggtttccggtgtagcctgccggaggccggacggtccatttttttaattgttctgcctcctggaaagcaacggacgcgtgcatttccggtgaaatggccagtgcgttctttacgcttgttgctgccggtttccggaaaaaatcgaacgggctgcaatcccggaggaatgcagcccgttgactgggcagggggcgcagggcagcggaacgtgcccgctgccgtcatgcgcgacttagaaggcgtagcttaccccggcgttgacccggtggtaggttgacttgctcctgccttcgaattcatagccggcgtaggccgtccatttggggttgatgacgacggtgctgttgtaattgacgcgtacggcgttccggtccgggcgggaacccctcgcggtccagctgaaatcgttcagcaggcgcgtggccctggtttccgggttgtcacgcaccacgtcgggcacgtagcttacggacaggctgttcacccacagcacgccgttgctgaattgcagggccttgctgacgcctacgcccacgggcaggctcaggttcttcagattcccgcggtcgaagtgccgggcgtcatatcccgtttccgtgaaggaattctggttcacctgcgtgtactcgattcccaggaagggggagagcgtccagcccttgttcaggctgtggtcccacgtggcctgaagggtggcgaagcccattctgttctgccatttgccgtgggaagcccctccgtcataataggagtccagcttgttggttgtccatccgaagccggctgttccgctgatggtcagcatgtccttgggggcaagctgctttctccatgctccgtaaagcagggcaacgtaggaggtctggtccacttcgctgggccagctgcggctcttgttggtgccgtacaggttgccgaaggcggcgcccagaatggtgttcggggtgaacctgcggtccgcacccacggcatagccgccgccattgtagtcatagccgtcaatgccgtcgcgggtggcatggtaggtgaagtctcccattcccttgatccagaagttattcttcggacccatcaggaaccgggtgatgcccacctggcccagagcggcattggaaacggacttcatgttggaagcggagctccacatggagttgccgatgtccgccccgtccagttccgggagaatctcttcaatgccggcggtggggttccagacggcgtacagatggtcgttgattccgtctccgtccaggtcttcccattccttggtccagtacccttcgtaggtatagggggagttgaccgtattggttccggtggctgtggaatagatgtcgtcaaaatccccggaagttccgggaatggccgcttccccgatggccatggccaggaagcgctgcttctcggcccatctcttgtgggcgtaatcctccagggaatccgctactcccatggagccgcccatggtgtggctgttggcttgctcgatgctgaggccggagctgtaatcgtccatgaaggggcggaagtcaaagatgacgcccttgctgatgtcgatcgtgtccgcatggaaggcggcgccccttccggttctcagggtcacgccggattcaatggtgatgttcctgctgttcacggaactgtttcccgtgatttccagaacgcccttgttcacagtgaaggatgagtctttggtgaggtccttgttgccataggtcactccgtcttccagaaccaacgtgccgtcatgcaaggtggtcttgccgctgacattgaagtacttggactccgccagccggttttgccagtcggcttccgtttctccggcggcctgggtgatcagcttgtccgcctccgctccggaaaagcggatggttccggtgaattccggagccgttccgttgtaaggagtggtatccactccttcggacttgttgaagtcatagacaatgttgtcatactccgctccgtcgccttcattccggaagggatcgtagaaggtgaccgtccttccttcctgcgcgcggagcaccacgctgtccatggaagcgcttccgttggttccaaacaccagggagttcagaatagggttggcccctccgcgtttttccgtgttgcctttcacgatgatgtccccctggtcagcggaaaagacggcatccttgtaatagaggagcatggctcccgcaacaccgtcaacggagttgttctcaataagcacgccgccgcggttgttgatgaattccaggccgttggctccctgaagagcgcccacatcccatttggccgagtttccggaaatggtgactttcccggtattgacaaaggacgtttttccgtctaccagcagggctccatatccgtaatccgtggatttgttgccggaaatggagatgtctcccgtgttgacaaaggacaggttcccgtggaactgccccacgccgtagtgccagcccgccgtattgttgtccatggagatgtttccggtccgggtgaacgaggtattaccggtcacctcaatggcgccgttgtactggtccgcgctgtttccggaaagggaaatgttccctgcatccgtgacgctgaacgttccgtaaaagcgcagggctccgttggaacccttggtagagtttccttccacggtgatgtccccgttgttgctgaacgtggtattgccgaagacggctacacctcccatttgattgtccgagctgtttcctgaaatggtgatgtttcccgtattagtgacgttccagtccttgctgatccagcccacggcatacgcattgtccgcgtggttgttgatgaaggtgatggagccgacgttattaaggttgaggcttccgctgacgccgaatgccccggcgctgttgctggcctggttgccttcaaagcgcaggtctcctccgatgttggagatgtccaggtcctggccgctgtatactgcgccgaagttgccgttccattcggaggccagttccccggcgtccgcccggttgttcttgaaaaccacgtctccggtaacgccgtctatcttcatgccgcctccggtattctcctggccgtctacggtgcctgcataagcgtatatggctccggccatccaggcggaattgttttcaaaggtcatgttgccgttgacgttctggaacgtcagcgcatattcccccgcgggaatgtaggccttggttgccgtagaagtggaatcatgcgcgcctgcgtaaatggcgcccccgatgttggagtgggcgctcgtgggcgagtggccggtggagttcccgctgaacaggatggacttggtattttcaaagtcgatctttccccacgtgaagagggctccccccagggcctgcccctgctggctgtcgtcacccagcatgttgttggtgaaggaaatattgcccatttgggagaaggtgatgtctccccttgcgttcacggcgcccccggcattcgtatccgcattcacgatggatttgcagttgttgaaggaaaggtcgcccatgtccgtgaaggtgagcgtttctccgcggatggcgcctcctccttcgttgtcattgacccagcggtcgctgtggatggaggaacaatcgtcaaagctcatggacattcccgtgccggtaaatgtcatgacggactcgctggcgggctgggtgtaatctgccagctgattgaagaagacgctgcctgcgaagacggtgtcttccgtccggaatccggaaaagctcaggtcctccttcaaggtgtaagtgatgctgtcctgcgtctcctggcgcgtgacaacggtgccctgatagaggtcttcagcctgttgggctgttcccgtctgcgccagggaggctgtcatcaggagaaggatggcggatactgcaaattttggtttcattagtatgcggtaaggttctttgttaggtaccagacctgagccgtcttttgcccgggcgcccgggtgggggcttttgcgcgcgctggcaccggtgtctggaaactataagagtcttttgagcgcgttttttctcaacggatgtcatgctgtacgcaaggctcttctaacatattattccgcttggccgttgaagctgaaaatgtccgggcccctcatctgtgaaaatatggcctgtgtcatacatagggtgttttatgagtgtaggtcaggaaatataacaaattttgtaatttaatgatttttagtaacgcatggataataaaataaagcttgttcctgtatttttgtagaaaagttatgcggggatgaatgacaatagaaatatgaacacttttgttcgtagaagcttctatccttcatgcgggcggtctttcacggctggcccggaaatgatgaaacaatagataccgtcatgtttgatccaaatcaaaaacccgatacagcccgggcagaaaattccattttcggctctccggaagcagacaacctcctgcccaaggatcagttcccggattacgccatgcgtgcggaggacgccttccagttggtgtccgatgaattgatgctggacggcaatgcccgccagaaccttgccaccttctgccagacgtgggatgaaaagcaggtcaggatgctgatgaatatcagtattaacaagaatatgatcgacaaggatgaatatccccagacagccgctattgaaatgcgctgtgctgccatcattgccaacctttggaacgccagccaggatgaaaaacccatcggctgttccaccatcggttccagtgaagcgtgcatgctcgggggtatggccgccttgtggcgctggagagcccgccagaaagctgccggcaaacccactgacaagcccaacctggtatgcgggcccgtccagatctgctggcacaagttctgccgctactgggacattgaaatgcgtgaaatccccatgtcacccggaaaatggaagatggatgtggacagcatgctggaacagattgacgaaaacaccatcgtggtggttcccacgtttggcgtgacctacacgggcgcttatgaattgccggcggagattgccaaggccctggacgattacgaagacaggaccggcatcagtgtagacatccacgtggacggcgccagcggcggtttcctggccccgttctgcgctccggacattgtctttgacttccgcattccccgcgtcaagtccatcagcgcttccggccacaaatacggcctggctccgctcggagtgggctgggtggtatggagagacatcgccgacctgcctgaagggttgatcttcaacgtcaactatcttggcggtgaaatccccaacttcgccattaacttctcacggccggccggacagatcatctgccagtattatgacttcatccgtctgggcaaggaagggtataccaacatccatacccaggcctatgaagtggccaagtacatttcagatgaggtttccaagctggggccgtacgaattcatttgcacgggcgatccggaaaagggcattcccgccgtctgtttcttcatcaaggacggagccaagacgaactataccctcttcgacctttcggacaagctgagaacccgcggctggcaggtgcccgccttcaccctccctgccaattgccaggatacggtggtgatgcgcgtgatggtccgccagggcttcaccaaggacttggcagacctgttcctggaagacttcaagcgcatggttgatttcttcgagaaacacccggtcacttctccgatgactgcggaagaaggcacggccttccaccactcctgatggaagctccgcagaataatttttgttggatgaataagtgtgtgtaagcgcagctccgcagttgtcaaggtttgtgcgtggacctggcggctgcggagtttttttatgctccggcggctgcgccgcggatggcggaagcgtgatggaggcttctgttgcggatgaacgcggactgctccggaactgtttccgaaaggggctttgtgagacctggcggacttttccgttccccctccggaattcgcggaatgccgtgtttccaagtttcttcatgaaatcctgtgcgttccccgtcttcttataaaaagaccggggattttgttattcctgcgtcttccgtttcgtttgggaaaaggcatgcttccgcaagcttccttgcatcattctttcggaagggtgggtggggatggttatagcgcgggctccggataaatgcggggtccacctggttgaggcgtcatctttacttggtgaaagattgctgcgtttcaaagcctggcgcgttgccgccatgtccggacaggcgggattgataaaaaccgtcctgttttttcatgccgccgggttgcagaccctgcggagattaccggcaggggacggcgcggaggctgttgattccctgatccgcttacatgatgccgcgtcgcggacgcgttgccggctggcagcgaatgatggattcaaaaaaattgtgcccgccgctttaatacgatcggcaaaaagcaagggaacaaccccggtcaggagtcttccatccatcctcaaatccggaatgcagcgggaggcgtggaatggcgcttagctgatgcagcggtaataataatccacgcgggaaatgaaccaggaccatttgaaaccgggcttgccgttgtccagcagcaggtgggggcagcgttttccggtccagtagtaatgcggcacgacgttccgcagggggatatcgtgggcgtacatgttgtaggcggccagcttggcggcgcggtcaaaggtcttgacgatgctctgtccccgcttttcgcacatttcaatgccgatggaatacatgtccccggggccgccccggtccgcatggcgtcccgtttcattcagggggatgtgctgcatggctacgtacggatccaccgtgtagtgccagttgcagcgcagggctccgttattcagcgcgcgcgcgtgctgcatggcgtctgcggaagggttttccgtgttgtgcatggtgatgaagcgcggcttcatccgggaagagcgctgccggagaggggaagagcggggcatgaacatcggccggacgttgcattccgccagcagctgccgcggagagcgcttcaccacggggacaccggagggcttgaaggaaatcatgggcgccattccggctttgccggagggttccgaacaactggtcagagccagcagggcggcggcttccagcaggaaggttctgcggtccatgccctggactttctccagcatgggctggagctgtccggaaacacgggcaagataagtggcgatggtggaaatattgctcatacggcggccgggaggtgggggatttacagcacggatgcgggaaaagtttagttcacgctaagattcacctttcttctttgcaacgaaaaagtgtgaaagctttagctttgtgccgaattcttcacgctttttgtcatattgggccgttcaaaccgttgttgagagcaaaacggtatccggttccacggcggtgacggcgtccgcatttgccggagacaggatgaattctccctgccgagccgttttcccgtcccaggacacggagccgcggagaaccgtgaagatggcgaagcgggaggcgtccggctgggtgaatctttctccctggtccagccgatattcctccgtggtgaaatgcggcatttccgtcaggtagccgggctgccgggagagctcccggaattccgcgatggaatccagcgcctgttccatgtgcagttcccgtccctgtccggaagcgtctgtccggttccagtcgtaaaggcggtaggtggtgtcgctgttctgctggatctccgcaatgaggtgcccggcgccgatggcgtgaaccaggccggcgggaatgtaaagatgttcccccttttccagatgggtggagcgtatcagttgctccatttggcccgtttccgccgcccggcggatgtccgagagcgtagcggtttcttccattcctccgtaaatcagggcatccgggtccgcatgcagcacgtaccatacctcgtttttaacctctccccgccgtgctgccgccgtgcgttccgggggatgcacctggacggaaagattctcacgggcgtccagaattttgcagagcaggggaaaacgcgtaaaacgttcgtagccgggcccgaagagttcttcccgccgttcttcccacagccggtgcaggggaattccttcccattcgccttccctcaccgtgctcatggcttccggacggtcgctgatttcccaggcttccccgtaggccgtttcccggtcgggcagttcccggcccagcatggttctcatgtgctggccgccccagatgcgcggctgataaatggaatggaatcgaaaaggctgcatcgtaataacgggagcgtaggccatcttttacggccgggcaagtaaaatgcccgcaggaggcctgcgggcatgaagagagggaaatcggcaagtttccggttatttgatggattcccatacgatgccgatctcatcaaacggcacatattccttgttcttgtccggtttcggcacaccgtagttggtccggaacaggggcaggatgggcgctcccgtcttggggtccttgctcatgggtgccattcccacttcctccagcagcagggtcatgccgaattcgccgccgggaccttcgctgaccaggatttcaatggggtacaccttgccttgctccaccgtgaactgcttgccggcggctacgccgcgcatggtgttgttccagtggccggaggggccgtatttgtagaacgtgacgggggggacgttgatgcccgcgtccttgagttccttcttcaggtcgtcgttgccgggcttgccttccatggcatcaagccatttggcgttgttcgccgtcattttccccagggaggcggattcccagccgtagtcgaatacgttctggttgttgaaccgcactaccaggtagtcgtctcccagccccacgaagcggaacgtgccggatttgggagcgcgcactttgccccggtaaatggcaagccactggctgggtttcaccttgtcgtcgcatccgtaggccttgggcgcgtctttggcgggagttctgggaatgtagaactgggcggcgtacaattgctgcggcgccttgtaaaaacgattcagctccgactcattccagcctttgttgacaaagcgggaaagaaaggcgcggtactggtccatcgtcatgttggtgggccgtccgccgggcgtctgcttggtatcgtaaaaggtgcctaccagcgtacttccggagggctgggacgtgccgaaggcggaggtggcgtcacccaggtcggggccgaagccatcccccatgcccagagcggttccttcttccagcatgacgggttcgtccggcgggtcaatgtcgatcttggggaggctgaccggggctgccgccgcggctaccacgactttgacgggagtttccgcatgggaggaagaggaggtttccctctgcacttccggcggcggaggcgtatccgacggaggagcttcgtccggcgtgatgtagccgacgaccttgggttcttccgggggggcgatgatgatggtcagggagtagagaatggctcccgccaggacgacggagagaatggatgtcgccaatgcggcaatgtaatttttccgcctttccttgcgcagggtttccactgcgtcttctgtgggttctatatgaaggctcatgcatgtatgataacataggagccccatatgttgagtaacatgaggataacaaggataacatgtcggtaacaaaaagggcgtctttgacgcctcttcttccttatggcttctcagcttttcctgcgctttcccgtttttccgggagccagtgcgatggcaagaatggaacagacgcccagaatcagggggtaatacaggtattccatgatcagcaggggggaaacctgggcgattccggcggccatgagcatctgggccccgtagggaatgacgccctggaccaggcaggaaaaggtgtccagaatactggcgctgcgcctgggcgggatatggaatttatcgctgatctccttcgcgatgggacccaccgtaatgatggcgatcgtgttgttggcggtgcagagattggccagggagaccaggccggcgatgctgaattccgcgccgcgcctgctccggatgtgggccgtgatttttccgatgatgtacgcaatgccgccgttgaagcggatcaacgccagcacgccgccggccagcagggtgacgatgatcagctcccccatgccggtcatgccgctgcccatggcgcggaaccaggccatgaaggaaaaataccccatgcctactccgacaagtcccgtggcgagcagccccagcgtcagaacggccatcacgtggactccggccagcgccgtcaccagaaccagcaggtaggggaacaccttcatccattcaatgggagcgtccgccatggagggggactgcacgttccatccgagcaggatgtagcaggccagggccagcagcgcggcgggaagcaccaccttcacgttagcccggaatttgtcccgcatggcgcagccctgcgtgcgggtggcggcgatcgtggtgtctgaaatgaaggaaagattgtctccaaaaaacgctccgcccaccacaatggccgtcatcatgccggtgctgacctgcgtggcgtgcgccagccccgtggctacgggagcaagcgccacaatggtgcccacggaagtgcccacggaaagggagatgaagcaggatgcgatgaagacgctggcaagcagcagattgtccggcaggaggcgcagcgtgagctgcacggtggcgtcaattgcccccatgtccctggcggactgggcgaatgcgcccgccagcacgaaaatccagatcatcatcaggatattccggttggctacgccggaggaaaacaggtccacccgttccgccatgcttttcccgcgggtgatgagcacggcccagactgccgccgccgtaaaggccaccgtcaccggaacggcgtaaaaatcctgtacggctacggagatgaccaggtaaagcaggaagaaaaccagcagggggctcagcgcccacaggctgggtttgacgggcgccgtatcctggctgtctggaaaatgggtcatggggagtgcgtgctgccggagatgctgggcggcttagtttccggcggcttccgcctggcccagataccaccggtagatgcgctccacgccttcttccagctccacccggtgtttccagcccagggaatgcagcttggaaacgtccgtcagcttgcgcatggtgccgtccggcttgtccgcgttgaataccagttctccccggtagccttccgtggcggctatcaggcgcgccagatcgccgatggagatttcctttccggtgccgatgttgatatggcagttccgcacctcccggtcttcccctttcagctggctgaaatccacctgttccatcacgtggacgcaggcgtccgccatgtcttcgctccacaggaattcgcgcaggggcgtgcccgttccccacagttccacggaaccgggggtaatgccgtatttggccagcgcggccaggatggcttcttccggcgccgttccgtccacctgttccacaggccgcgcgtccaggtctttccggacggcgtcccagtccccttccatcaggcgcttggccaggtgaatcttgcgcaccatggcgggcagcacgtggctgttctccaggtggaagttgtcattggggccgtacaggttcgtaggcatcacggcgatgtagttggtgccgtactggaggttgaagctctcgcacattttcaggcctgcgattttggcgatggcgtagggctcgttggtgtattccagcggggaggtgagcagggcgctctccttcatgggctggggtgcctctcgcggatagatgcaggtgctccccaggaagaggagcttggatacgccgtgccggaaactttccccgatgacgttctgctggatctggaggttgcggaagataaagtccgcccggtaccgtgagttggcgatgatgccgcccacgaacgccgccgccagaaagacgtattccggcttttcccggtcaaagaattcccgcacggccgccgggtcctccaggtccagttcccggtgcgtccgtccgatcaggttggaataacccctgtcttccagggatttccagatggcggagcccacgaggccgcggtgtccggccacgaatattctgctgtttttttccatctcaggaattgacgggatttttgacgtattccatgtcatggcggaccatgatgcgcacgagttcctcaaacggggtggaggtggggttccagccgaggagggttctggccttggtggggtctcccagcagttgttccacctcggaggggcggaagtacttgggatccacttccaccaggatatggcccgtcttcttgtcgcgcccgcgttcttccacgccttcgccttcccattccagctcaattccggcttcacggaaggccagcgtgcagaactcccggaccgtgtgcatttccccggtggcgatgacgaagtcttccggcttgtcgtgctgaagaatcagccacatgcattccacgtaatccttcgcgtagccccagtcacgcagggcgttcaggttgcccagataaagcttgtcctgcatgccctgggcgatgcgggccgccgccagcgtgatcttgcgggtgacgaagttttccccgcggcgttcgctctcgtggttgaacaggatgccgttgacggcgaacatgccgtaggattcgcggtaattcttggtgatccagaagccgtattgcttggctacgccgtagggggagcggggatagaacggcgtggtttccttctggggaacttcctgcaccagcccgaagagttcggacgtggaagcctggtaaatgcggcatttcttttccatgcccaggatgcggacggcctccagcatgcggagggtgcccacggcgtccgtttccgccgtgtattccggcacgtcaaagctgaccttcacatggctctgggccgccaggttgtagatttcatccggctgcacggtctggatgatgcggatcagggagctggaatccgtcatgtcgccatagtggaggttgatcagccggtttttcttcatgtcccgcacccactcgtccaggtaaagatgctcgatgcggcccgtgttgaaggaagaggagcggcgcaggatgccgtgtacttcatagcccttgtcaatcaggaactctgcgagaaaagaaccgtcctgtcccgtgatgccggagattaatgcgattttgctcatgtgctgtgtgtaggtggtttgttggcggaggaggttgaagaataaatggtgaaacctccagcggagccgcagttgatgcgctccgggcataaatagcgcatttttcccatggtgacgaggaaaatgctctggtcatggaagaggaatgccactgtcagcggacggcttttcctttgccggacgcaatcatttccttgaaatcctggaacaggtactgggggtctctggggccgggggcggcttccgggtggtactgcacgctgaaaacggggagcgttttgtgggcgatgccctccacggtattgtcattcaggttcatcagcgtgatttccacgtcgtccggcacggtatccggatccacggcaaaaccgtggttctgggacgtgatgctgattttacccgtgcggaggtccttcaccggatggttggcgccgcggtggccgaacttcagcttgaaggtcttcgcccccagcgcgtgggaaatgatctggtgccccaggcagatgccgaacatgggaaccttcccgatcagggcggctacttcacggtggatgtccgtcagcgtggcggggtcccccggaccgttggaaagaaaaacgccgtccggcttcatgccaagcacttcctccgccgtcgtgtgggcgggaaccacggtcacacggaagccgttttccctcagttggcgcaggatgttgtacttgatgccgaagtcgaaggccacgatgtcgtactccgtggggggcagtaccccttctgtcaccagcgcgtccacttcctccggggtcatgggatgggagccgatcttgtctacgatgttgcagccttccatggagggggcctttctggcggcttccacggcttcctccggcgtcagctccgtggtgaggcaggcgcgcatggcgcccgcggagcgcaggtgcttggcgatcttgcgggtgtccaccccttcaatgccgatcacgccctgcttttccagccacgggcccagggcttccgtggcgcgccagttggaaggaaccttcgccagctccgccaccacgaagccgctgacctgcgccttgccggactcgtaatcttccgggttgacgccgtaattgccgatcagggggtaggtcatcgtgacgatctggccgctgtaggacgggtccgtcaggacttcctggtagccggtcatggacgtgttgaagcaggcttcccccacttccgtacccgtggctccgaagtgcgaaccgatgaagacgcttccgtcttccagtgcgagaatggctctcatgatgatataaaaatgctgtgtggtatggggttaaacggtctgggcatggtattcctggatggtgcacacctggaggttcctgttcttcagcgcctcaatggcgttcacgcaggcctgcgcggaggccaggttcgtgcagtaggaggttttggcggcgatggcggaggaacggatgatgatgtcgtccgcccgcgcgtcgtgggagccgggcgtgttgatgatgaaatcgatgtccccgttcttgatgtggtccacgatgttcgggcggcgcgcctcgttcaccttgtacgcgcgttcgcattcgatgtcgtgctggagcaggtggatcatcgtgccgcgcgtggcgcacagcgtgaagcccatgtccgccagctggcgggccatgtggagcacgcgctccttgtcccggtcattcacggagatgaaaaccttgccttccgtcggcaggggattgaatgcgctgatctgggatttggcgaaggcgatgtccgggtccgggtcgatgcccatcacttccccggtggatttcatctccggccccagcaccacgtcgatgcccgggaagcggccccaggggaagacggcctccttcacgcagtggtattccggcgtgatttcccgggtaaagcccagctcctccagcgtcttgccggccatgacctgcgcggccagcttggcgaggggcctgccgatggccttggagacgaacggaacggtgcgggaggcgcgcggattcacttcaatgacgtaaagctgttcgtccttcacggcgaactggatgttcatcagcccgcagacgttcagccgccgtgccagctccttggaggcgcgcgtgatttccttgtgcattttcatggaaatgcccatggcgggaatcatgctggcggaatccccggagtggatgcccgcgggctccacgtgctgcatgatggcgccgatgacggcccgctcccggtccgcgatgacgtccacgtcaatctccacggcgttttccagaaagcggtcgatcagcacggggcgttcctcggaggcctccacggcttcgttcatgtaccggcgcagctcctgctcctcgtacacgatgatcatgccgcggccgcccagcacgaaggacgggcgcagcagcaccggatagccgatgcgggcggcaatggcggcggcgtcctccacgttggtggccgtccccgcgtccgcctgcttcagccccagctccctcagcagggcggagaaatgttcgcggtcttccgccaggtcaatggccttcgggctggtgccgatgacgggcacgccgtgggcttccagggcgttggccaggttcagcggcgtctggccgccgaactggacgatgacgccgtccggcttctcctgctcgcagatgtggagcacgtcttccagcgtcaggggttcaaagaaaagcttgtcggaggaatcgtagtccgtggagacggtctcagggttggaattcacgatgatggtttcataccccatttcccgcagggccatggaggcgtgcacgcagcagtagtcgaactcgatgccctggccgatgcggttcggaccgcctcccaggatgaggatcttcttccggcccgtgtcgcgcgcctcgttttcatccccgtacgaggaataaaagtaaggcgtgtatgcctcaaactccgcggcgcaggtgtctaccaggcggtagccgggcacgatgccctgttcgcggcgttccttccggatgctttcctccgtagttccgcgggccagggcgatctgcctgtcggaaaagcccagcttcttggcttcccgcaggtccagcgcgtccaggcggtcgcccgccttcgccaggtcccgcatctgggccaggaaccaggggtcaatctgggtgagctggtgcacctcgtccagggaaaagccgctgctgaacgccgtctgaatccagaaaatgcgttccgccgtggggacggcaagcttccgcgtgatttcctccgcggtgggcttctgcggcgccttcgcgtcgaaaccccagccccagcggcccgtttccagggagcgcagggccttttgcagggattccttgaacgtgcggcctatggccatggcttcccccacggatttcatggaggtggtcaggtgctcgtccgcctgcttgaacttttcaaacgtgaagcgggggaccttggtcaccacgtagtcaatggtgggttcaaagcaggcgggcgtttccctcgtgatgtcgttgcgcagttcgtccagcgtgtagcccacggccagcttggcggccagcttggcgatggggaaccccgtggccttggaagccagagcggaggaacgtgaaacgcgggggttcatctcaatgacgatcatgcggccgttggccggattgatggcgaactggatgttggaaccgcccgtctccacgccgatttcccggatgacggcgaaggaggcgtccctcatgacctggtattccctgtccgtcagggtctggatgggagccacggtgatggaatccccggtatgcacgcccatcgcgtcaatgttctcaatggagcagatcaccacgcaattgtccgcgcggtctctcatcacttccatttcaaactccttccagccgatgagggattcctcaatcaggatttcggaaacgggggagaggtccagcccgcgggcgcagatttcctcaaactccgtcttgttgtacgccacgccgccgcccatgccgcccagcgtgaaggcggggcggataatcaggggaaaggtgcctatgtccccggctacccggcgcgcctcctccatcgtgtgggcgatgccggagcgcggcacgtccaggccgatgcggatcatggcctccttgaacaggttgcggtcctccccgcggtcaatggcgtccgcatgggcgccgatcatgcgcacgttctccctctccagcacgccgctgcggtggagctccatggcgcagttcagggccgtctggccgcccagggtggggagcagggcgtccggcttttcccggacgatgattttctccacgaactccggggtgatcggttcaatgtaggtgcgcggggcggtctccgggtccgtcatgatggtggcgggattggagtttaccagcactacttcataaccttcttcccggagggccttgcaggcctgggtgccggagtagtcgaattcgcagccctggccgatgacgatcgggccggagccgatcacgagaatctttttgatggaggtatctttaggcataatggcgatggaagaatcctgtggttctggaccgtggatttccgccgggggaattaagtgcccgcagggctccggaggaaagtttttttacggccaatgacgcggatttttcaggggttggtggtcggtggaaaacagtgggaaaaagggcggctgggacagggcgcgccaaggccccggagccgtgcctttccctctgcgggcagaggcttgccccgcaagggggccggcaaagctccggagctcgtcggtgcaccctaatagatgaacagcatttcccggtacttggggagaggccaggaccggtcgttcaccagggtttctgcggcatcgacgctggttctcaatcgggacatcgcggcaaggatgtcctcatggcagctcgtgagcgcggtttccagggtatccaggtcggacacgacggaatccagggcatcgcccagcttgtccgccagcttttgcagggcggcggtcccgttggtccgcttggcgtccagcgccctggagagcgcggaaacggtttgcttgtattcgttgcgcagggcagggaggatgatggtggccgccatttcccaggacaggcgcccttcaatgcggatgcgcctgtggtattcctccaggaaaatctcaaaccgggattccagttccctgcgggagaacaccccgtacttctcgaacagggccacattcttctcattcaccagggtgtggagggcggtcatcgtgtttttcaggttgggaaggccgcggcgttccgcttccttcacccattcctccgaataattgtctccgttgaagatgattctcttgtgttcggaaatcctgcgcttgagcgtctcctggagctgggccaggaaggtctccggagcgaaggaggaaagctcctccgccagggaatcgaaggcctccgccacaatggtgttcagggtcatcatggggcccgcgcaggactgggcggagccgggggcgcggaactcgaacttgttgccggtgaaggcgaacgggctggtgcggttgcggtccgtcgcgtcccggggaaggacgggcagcgtatccacgccgatctggagcgtgtcgttgcgcctgccgcggccggattccccgttgatgatattctcgatcacttcattgagctggtcgcccaggaaaatggagataatggcgggaggggcctcgttcgcgcccaggcggtggtcgttcccggcgctggctacggaattgcgcagcaggtcgctgtgcttgtccacagcctcgatgatggcggccagcacggtcaggaaaatggcgttctgctgcgggtccgtgccgggatccagcagattcttgtccccgtaggaaatggaccagttgttgtgcttgccggagccgttgacgcccacgaagggcttctcgtggagcaggcacaccagcccgtgcctgctggcctgctggcgcaggatttccatcaccagcatattgtggtcgatcgccaggttcacgtcctcaaacaggggggccagttcaaactgggccggggccacctcattgtggcgcgtcttggccggaatgcccagccgccagagttccttttccacatcattcatgaaattgaggatgcgcggcttgatggagccgaaataatggtcttccagctgctggtgcttggcgggcggcgcgccgaaaagggtgcggcccgtctggaccaggtccgggcggttcagatagaaattcttgtcaatcaggaaatactcctgttccggccccagcgtgatggtcacgcgttcgtccggcagcccgaagcacttcatcagcctcttgacggcgttgcccaatgcctgccgggagcggagcagaggggttttcttgtccagcgcgtctcccgtataggaacaataggcggtgggaatgcagagggtggctccgttcccgtgcctcttgatgaaggcggggctggtggggtcccacgcggtgtagccgcgggcctcaaacgtgcagcgcaggccgccggaggggaagctggaagcgtccggctcgctcacgatcaagttcttgccggaaaagctcatgatcggctccatgcccttggggtccaggaaggaatcatgcttctccgccgtggaacccgtcatgggctggaaccagtgcgtgtagtgagtggctccccgttccagagcccactgcttcatggcgtgggctacgtccgcggcaatgtccgcgttcagcggcaggccgtcctggatggtggacaggagggttttcgccgtgtccttgggcaggtacttcttcatcacctccgtactgaaaacgtcggcgccgtaataatcaatgcggacaggagcgctctcgctcaccccgctcacgggaagggaggcgatggcgctgatggcttgtgttcttgtcgagtcactcatcatggttaactgttgtatctttttcctagcaagaaccgtgccagatttttgaatcaacttgtaccggagtgggtatggtgttttaagaagttgcctataaatatattgcagaaattgtaaaaggaagccgtggaaagaagagggatgaaaaaggtgaaagcattaattacaaaaatgtaaaatcacggtaaaagggtaattacgaaaatgtaaaaatatctgcttgggagagggaattgtcctttgccgccgtggggcctctgtcatgccggaaggcctgtcaaatcatgtaaaaccggggcggcggcgttcggaaaacggggagagtggaaggagtgcataatgttggcacggtttttgctataaggaaatcagcttaactcaaataaaacagcaaactgatgaatagtgatcaattcgagacaggcattcctgcgccgcagggattgtatgactttgaacaggagagggacgcctgcggcgtggggctggtggcggacctgaagaatgaaccgagccacaaaatcattgaaatgggtgtcaccgttctcaagaggctgatgcaccgcggcgccgtgggaagcgatcccgataccggggacggagcgggcatcctgctggccctgccggatgaattcttccgcctgctccttcccaacaaactccccgccagaggaaaatacggagtcgccatgatgttcggcggctgcggccatgaagaggaactggaggccgccgtcacggaaaacggcggcagggtgattgcctggagagaagttcccgtggaccgggacagtatcggcgagaacgcccggcgcacctgccccctgattcgccagctcttcatcgacggcagcggctttgcggaccaggcggcactggaacgcaagctcttcgtaatgcgccgggaaatggagcggcgcgtggaaggatgctacgtgtgcagttgttccagccgcagcatcgtgtataagggattgttcctcggcacgcaaattgacggattttacgaagacctgcgccatgagcgtttcaaatctccgctggccctcgtccaccagcgctacagcacgaacaccttccccacgtggagcctggcccatcccttccgctacctggcccacaacggggaaatcaacaccctgcgcggaaacctgaaccatctgagcgtgcgggagccgcacctgtcctccgccctgctgggggatgacttgcagaagctcctgcccctcattcctcccggccagagcgattccgcctgcctggacaacatggtggaactgctcgccgccgccgggcgcgacctgcgccacgccatgctcatgctcatgccgcaggcctggggcgtcaactaccatctggggccggacgtgcgcggcttctttgaataccattccgccctgatggagccgtgggacggcccgaccgccgtcgtcttctccgacggcgtcaacgcgggcgccatgctggaccgcaacggcctgcgccccgcccgctacacgctgaccacggacgatattttcatcctggcctcggaaacgggcgtagcggacattcccgcggaaaaagtggcccgcaagggccgcctgcgccccggagagatgatctactgcgacctggtgaatcaccgcctggtgtccgatgcggaaaccaagaatgaaatggcccggcgcatgccctaccgccgctgggtggaacaaaacaagatttccgtccgctccctgttcgactctgtctccgcctccgcggaaatgccggacctggcggttcatcagcgccagttcggcttcacgcaggaggatgtggaactcatcctccgcccgatgatgatgaagggcgcggaacccctcggctccatggggaacgacgcgccgctggccgtcctctccggaaaggcgccgctcctgttcaattacttcaagcaattgttcgcgcaggtgaccaacccgcccatcgaccccatccgggaggaactcgtcatgagcctgaccacgtacatcggcaaccatcccaacattctggaggaaacgccggagcacgcccggctcatcaagatggcgcgccccgtcattacggacgaggagctcaaccgcctctgcaacatccgggaagccggcttcccctccgccaggctccccctccagttcccggaaggcggggacggaaaggctctgcgggagacgctggacagcctggcggaatccgccgtggggctggtcaggtccggcgtgcgcatcctggtgctgacggaccgcaacataggccgcggctaccttcccgttcccagcctgctggcctgctccgtggtgcaccgcgccctggcggccgccggactgcgttccgacgtgggcctgatcctggaaacgggggaggcgcgggaaacgatgcacttcgccctgttgctgggtttcggggccacggcggtcaatccgtacctggctctggcgacggtcacctccctggccgcgccgcaggactgcccgctggacgtggtgaaggcctccggcaactacatcaacgccattgacaaggggctgcttaaaatcatgtccaagatgggcatttccaccctgcgcagctaccgctcctcccaattgttcgaggccgtggggctgaaccgggaactgattgacgaattcttccccggcaccgtcagccgcgtgggcggcatcgggctggaggaaatagctgcggaatgcaaccagcgcgccgcgcaaaacgccgggaaggaaggcgggctggatgcgggcggccagtacaagtacaggaagggcggagaaaaccacctctggaacccgcagacgctccaggccttccgcgccgccgttcgcgacaatgacgaacggaaataccgggaatttgcggactacagcaaccaccaggcgcagcacctctgcaccctgcgcggcctgtttgaattcgctcccgcggacaccgtcccgctggaggaagtggaaagcgcggattccatcctgcgccgcttcgtctccggggccatgtccctgggttccctcagcccggaggcccatgaaaccatcgccatcgcgatgaataaaataggagccaaaagcaactccggtgaagggggcgaggatgaagcccgctacgaacccaacgccaggggcgaggtgcgctacagcgcgatcaagcaggtggcgagcggacgcttcggcgtgaccatcaactatctgcgccacgcctccgagctccagatcaagatggcccagggcgccaagcccggagagggcggccagctcccggcgcacaaggtggacccgtacatcgcccggctgcgccattccatgccgaacgtcagcctcatctctcccccgccgcaccatgatatctactccattgaagacctggcccaattgatctacgatctgcggaactccaacccggccgcacgcgtctccgtcaagctcgtctccgaggtgggcatcggcgcggtggccgccggagtggtaaaggcccacgcggacgtggttgtggtcagcggccacgatggcggtacgggcgcctccccgctcaccagcgtcaagcacgccggactgccatgggaactgggtctggcggaaacgcagcagacgcttgtgctcaacaagctccgctcccgcgtccggctccaggtggacggccagctgcgcaccgggagggacgtcgtcatggcggccctgctgggagcggaggaatttggcttcggcactgccgttctggtcgccatcggctgcgccatgctccgcaggtgccatgaaaacacgtgcccggtgggcgtcgccacgcaggacccggccctgagagccaagttcagcggcaagccggaatacgtcatcaactaccttcgcttcgtggcgcaggaaacgcgggaaatcctggcttccctgggcctccgctccctggacgaagccgtcggcagggcggacctgctctccgtgaaccgcgccattgacttctacaaggctcagcatctggacttctcctccatcctgcatgcggcggagggggacggacgcaggtttgacccctcctttgaaaaggaacctctggacaactacgaccggcgccgcctgctcccgaacttgaagggcctgctggaaaaaggggaaaagaccgaactcttccgcgacgtccgcaatgtggaccggacggtgggcacggagctatccggagagctggtgatgaaattcggcccgcgcggcctggcggaggatacgctcacggtgcacttcaccggatgcgcggggcagagcttcggggcctttctggcgccgggcatcacctttgaactcgccggggaggcgaacgacttcgtagggaaggggctttccgggggcaaaatcatcgtgaggcctccggaaaacatctcctacgctccgtcggacaacgtcattgccggcaacgtcatcggctacggggccacgtccggaaaaatcttcctgcacgggcaggccggggaacgcttcgccatccgcaacagcggagccacgatggtggtggagggcatcggcgaccacggctgcgaatacatgaccggaggccgtgtggcggtgctcggcaaggtgggcgtcaacttcgccgcgggaatgactggcggactggcctacgtgtacgatgcggacaacgacttcgatcagaaatgcaacctgggcagcgtggacctggaaacggtcatgccgcactccgccgacgaggcggaactgctccagctcatttacgagcactacatggctacgaaaagccgccgggcctgcgacctgttaaacaactggccggaggaacgcggcaaattcatcaaggtcttcccggtggaataccggcatgccctggccatgcattcctgaaagaagcatgcagcagttttctgttgtttgggtaagctgggggcctccgcgggtgcggaggccctttttttgttctttgaagtcttattggtctcattgccggagcgtccgctgaccttttcaaggtagcagattggacctgaaagcaggaatgaagtaagtttctgaaatccgatattaaaaaataactttccatttggttgactttgaatgatgcatcaattatacagaaaatatcataaaaggataatgagtgtcatattcggaaatttatgcagtgctgtcgctatgctgctgattgttatggggatgtggactgaggggggaattgcctttgtccaagtgccggaacggctgccggaatgcccggtgcgcttcatccgcggtaccctggtggcgcaggatggagctatatgggccgtgggggagagggaaagcgtttaccgccttcaagtcggcgacagggcatacgagaagtcgtggctcaacatggattattattccggctttcccaaaggaaagaatttcacctgcattgcggaggacgggcagggccgcatctgggtgggcacggacgacagtggcgtggccgttttcaacgggagggagtggaagacgtatgaccgcggcaatgccctgaacggagagcatgtttatgcgctggccgtctctcccgtttccggggaagtggccgttgccacgtccggaggcgtgtccgtttatgatcccgggaatgattcatggaaggcgctggaccggtccacgggactggcggaggaccaggcggcttccgccggctttgacgccagggggaatctgtggctggcctatgcctgcggcggtatctcgtattcgccgcgcaagtcggggtacatgcagtggaagaacgtgcaggcgccgtggtactgggacagcaagcagtttgcccggcagccgtaccagccgtatggggacgggctgccttccaatatctgcaatgttctggcctgtacggaaaaagaccaggtactggtgggaacgtgctccggcctggcgtacagcaacggcatcagctcctggcactatatgagagggtgcgattatgcccggaaaaacaccggcatttatggctcctcgggacggaagacggccgttccgggtgagggaaatgccaaaatgctgtcggaagacttcgtgtcttccatcctccggcagggaaaggatattttcattggctaccggacgcagggggtggacgtgctggatgccgaaaggatgacggtgcgccggagaatcaggaagggactggaaaatacggatgtcccctccctgctggcgctgaaggacggaagtgtctgggccggcacatatggacgtggttttgtcagtctgaaaaagggttccctgtcttatcaactggacaggaagcagcaggacgatgagattccgttcccgtccccgtcccggatggaagaccctgccgcagtcctgaagaggctggaaaagctgggtgcgggcgcgcatgcggggaagagcattgtgttccgcggggaggactggtccacgaagggggactggtgcgggaggtacggcctgacgcgcgccacgctgtgcgccacgaatgcccccatgagcaattccgagtttaaagccaagcaattacctgtccgcatggaaacgagcgctgaagaccctaaatggaaacgagtgtatccctgttactggatccagggactgatggggctcaaccgcaatcagggagatggattgcgctggtgggtacaaagcgccaatgtggcaggaaaccgcaatgttctctttgaccccagtgattccacaagaacagaggcggaatgggacgaccacggggaagtgtacccctcctttgcggacggtcccggtatatgggtagctgtggaagtgccggaaggggttcatgaaatagccctgtatttctataatcccaacggatatcttcaacatgaatccaggcgggattatgtggtagaagcccggaggcatcctttttcttcttccattcaaagcctgttcgacaacaaagcggatattgaaattgggaaccgcactaaaaaagggaagatgcttgccgcttctatggagcaatggcagtcgttcccggtggaagcgcgtacgcgcgtttccaggtttgcggggtccggagtttacaagcgcttcatgtgcaggaaaggcggcgtatacttgttccatgtttgcaggaacggttccttcaatactattttaaatggggtattcatcaatgcgcttcttcctctggaaatgagaacgcctgatgaattgccttattatgttgatggattatttgcaggcattattccttcccccgagagagttcattcttctgttgccgggccggaggagaaggttcttctcaatcaactgctcactctccagtatcatccacggtatgttacgcccgcaggatcttcctgcttgaacaggtacattctttcctcattccgtgaggcggttgaaggaaagaaaaagagcaggtgcttggaagactggtttcaatgggaagccagaatttactctcccgatgtacgttcttcttttgaccagaccatggcggctgcgtgggaccagtgtcagatttattatccggatctcagatccagggaatgtgttccgaatgccccgggcacgatacctttttccgtaaatgaagtttatttgatggataagctggatattgattggaggcaatatcgagatgatgccgaacaacctcctgtgaaatcagttcaagagatgaagaaacaccttgaacatgaatcccaaaagaaaacgacaacatgaataataaaatgatattggctgcgggaatcagtctgttgagcatgaacgtgctcaacggagagattaccggggagcataccatgtggtcaggaactcatctgaattacgatggggtttccattattaataagccggcgcttccccaaaagggagtggaagcaaaaaagggtgtaaaaaatgcctacaatattatgccgggtaaagtgacggtgatcacaagcctcaataaaaatcctcaggaaaaacaggaatggctgtacaaaaaaatacatgaagtacggatatccatgactggagatatatatgtagcgctgatattcgccgatacgaagaatgatgtccccttcgcctatgatccaaataaatttggaacatcgggaaccctttattcacaagtctatatcacggccctgcacaaggtgactaaaatggagaataaaagtgatttcgggaccagcggaaaggatgaagaccctacttttactttagttaagaaaatatgaccggcattccggcggtatgatgcgggggttttattccttatccggaaagggataagacttcaaaaaagggtttccggatgacaggggcccttgttttttagagttggatatatagcaaacaggggctgttccgcaccttgctggcggaacagcccctgaatggagtcttctgttaattcaggaagctcaggccttctttctgcggcgcatcagcagggccgtgaggcccagcaggctcagggtggccgtgccgggttccggtacggccaggccggtgaaggtcaggctgccgttgttgtaggtaacgccgtcccagatcaggttttggccgttctgcgtaagcgtcagcagggaatcccagtcgatgttgtccgccagggatgtgccttcgcccacagtgatcaggtcgatcgtcagggaggtaaggtcaagcgccagggcgctgtccagattcagcgtcaggctgccggtcaggttcagggtggacgttccctgcatgtcgatcagagccgtgttgaagctggagagattcagcgtggcgttgttcagcgtggcggaggtagtgccggaaagcgtcagcacctggcctgtggaaatcatgggcgcgccggaagcgttgcccaggattactgttgagttgttgatggcggcgttccccgtcaggctgacggtgaggtccttgggagcggaagcgctgccgaggttctggatggtgcccgtctggagcgtaatggcgttggccagggcctggctgttggcgttgagcgttcctccctgcaccaggacggaaccctggccaagtgcggttgcggagttggtctggagcgttccctgcacgatggtggtgccgccggtgtacgtgttgttgccggagaaaacgactacggagctgttcttgttcaccttcacgctcatctggtgggaggcgtccttgtcggaaatgacggaggaaatggtgaagttgttgcttccgctggaaccgttggtgaccagcagttctccttcgccggtgatcgttccgccaaggttggtggcgtttccgtaaagggagccggagatggtcacgccggctccggcggcgtcaacggtaatgttggcgctgatgggggtatccgcgccataggcgcggcagttgagcatttcaaatgtggagccggacttcatcaggatatccggcgtgccgcccagtacgatgcctacgccattcaggctcagcttggagttctggccgatggtgatggattcaaacgtgtaggcggtgtcgctgccggacaggttgactgtgccggcgtcaatgatcaggtgtgcgatgtcggaggcatggttggcattgatggtgccggtgccgtccgtcaccttgcggaccgtcagggtgctgtctgcgtgggtgatgggaataagcgttcccccttcaaaggtgtattccacgtctccggctcccgtcagggtgagggaggaggcggtgtgcgcccaggagtcgttggcattgtagttggccgccgctatggtcagggctccggcgaaggtccagttgggattggctgccgtgatggaggcgttttctcccagagtcagggctcccgtatagcgggaggcggtatctcccgtgatggaaatggaggcgttgtcccccagattcagggctccggaaccggccaggcccgtcagggtgctggttccgttcatgatgacggtgccggccccgtccagagtagccgttccggacaggctggaggacacggtgagcgtggtgccttctgccgcgcggaggatgccggggcccgacaggctcagggtgccgccggaaatggtgaggtttccgccggtgagtaggatggcgtccgtatggcgcgtttccccgtccgcaatagtcagggctcccgggccgttggtgacgttgatggaggcataggtgccggctccgtcagcggagtccgtccatgcggcatcccccagttgggaggaggtccactcggaggaggaggcgccatccagcgtagcggaaattttaacgccctcataggtattgacgatctggatgcctgcaatgcatccgcgggtgcctgaaccgctggtattgctcggagcggtgatgctcaggttgggtgaagtctggccttccacatacagcgtattggttccttccaccgcctgtccaaaggttcccgttgctccccacgcggcagagcctgccacggtggaagttccgttccaggtgtaggaaacgccgttgacggtcttggcggaaaaattgccgttggcggtgtccgtattgcaataaatgtagacgccgtaggtcaggaaatcaacgccgctgacattgatggtgatgccgctgccgtcgtccaggtagcccttcagcatctggccgtccccggtggagggggtgtcgcctccgcgccaggtatttttactggaccaggtgacggtcgctccggtggcgtctccgttgttatccttcaggttctgggccgtggattgggaagctccgctgaattgattccagttggagccgggaacggcttcaagcccggcgctggaagaatcggaaatggtgccgtttggttcgttggtaccaaaattgatgctgatgctttctccggcagcctgggattgggaggcgagagttccgaagaaggcggctgccataagccacgctgttagttgataaggcaaatgaggttgcatgaaattaatactatagtaatttaaattattccattcaaaattcaggagagaaagagacccctgcgatacccggttcttatcggattccgaatccgaagtcaatgccaggaacacagtttgagtattaaaacatgttagatagattttgatttgaattcattttttgagaaatagcaattaatgaaaaaatgttttccaaatgataattctatctgacatgtcttgatattcaatgtgttcatggcattgacatcggattcggaattcgatgttgatgaatgtccggaaagagcatttttgaaagaagaaaaagcggttggtcgccgcttttgagttagtctcctgcattttttctgtccgggtacaggaagggcggtgtgtcttgggtttttctaaaccctaataatttttataactaacatatattgaatgacttatatatttgactgtgaatcgattgtgtggttttttgattggataaaattgagaataacttggaaatggggttgacgtcagcaaaatacgataatattctcacataataatcaggaaataattggttatgttaattaaattcaaacatttcataggaacactcgcattggttttccccctgctggggggatggtccgcaggagaagtcaaatccgtccaagtgccggaacggttgccggaatgcccggtgcgcttcatccgcggcaccctggtggcgcaggatggagctatatgggccgtgggggagagggaaagcgtttaccgccttcaagtcggcgacagggcatacgagaagtcgtggctcaacatggattattattccggctttcccaaaggaaagaatttcacctgcattgcggaggacaggcagggccgcatctgggtgggcacggatgacagcggcgtggccgttttcaacgggagggagtggaagacgtatgaccgcggcaatgccctgaacggggaacatgtttatgcgctggccgtctctcccgtttccggggaagtggccgttgccacgtccggaggcgtgtccgtttatgatcccggaaatgattcatggaaggcgctggaccggtctacgggactggtggaagaccaggcggcttccgtcggctttgacgccagggggaatctgtggctggcctatgcctgcggcggtatctcgtattcgccgcgcaagtcggggtacatgcagtggaagaacgtgcaggcgccgtggtactgggacagcaagcagtttgcccggcagccgtaccagccgtatggggacgggctgccttccaatatctgcaatgttctggcctgtacggaaaaagaccaggtactggtgggaacgtgctccggcctggcgtacagcaacggcatcagctcctggcgtttcttgcgcggccgggattatgcccagaagaatagtaatctgtatggttccgctgcgcggaagacggccgttccgggtgagggaaatgccaaaatgctgtcggaagacttcgtgtcttccatcctccggcagggaaaggatattttcattggctaccggacgcagggggtggacgtgctggatgcggggacgatgacggtgcgccagagaatcaggaagggactggaaaatacggatgtcccctccctgctggcgctgaaggacggaagtgtctgggcggcgacgtatgggaaagggcttgtcagtctgaaaaagggttccctgtcttatcaactggacaggaaacagcaggacgatgagattccgttcccgtccccggcccggatggaagaccctgccgcagtcctgaagaggctggaaaagctgggagcggatgcgcatgcggggaagagcattgtgttccgcggggaggactggtccacaaagggggactggtgcgggaggtacggcctgacgcgcgccacgctgtgcgccacgaacgcccccatgagcaattccgagtttaaggccaagaccgtgtcgttccgaaccctttcctccgttccgggttatcccggataccagggggccgtgtcttcttactggatccagggattgatggggctcaaccgcaacaagggggatgccctgcgctggtgggtgcatagcatcaaggagaatgataaccgcaacattcttttcgatcccacggattccgtgcggacggaggcggaatgggacgaccacggggaagtgtatccgggctttgtggacggtcccgacatttggaccgttgtggaagtgccggagggcgtccatgaaatagccctgtatttctataatcccaacggttatctttccaatgaatccaggcgggattacgtagtggaagccagaaggcatccttccacctcctccctcgtcttccagttcaacaatgtgggagacctcgcgataggggaacagaacaagtgggggaaaattcttaccgccgccatggagcagtggtattccttcccggtggaagcgcgcacgcgcgtttccagatttgcgggttccggggtttataagaggttcatgtgcaggaaggggggaatctacctgttccgtgtttgccgcaacggttccttcaataccatattaaacggcgtattcgtgaatgaaaagattccgtgggaaatccgcatgccggaggaactgccctattatgtggccggccagctcgcgggcattgttcccactccagagagagtgaacggagccaccctggggcagagggagaaggccgtatgcaagcccctctatgagctgcaatacacgcgcaagtacctgacgcctgcggcgtgcagccttcagaacaggtatattctctccctgtggcggcaggcccgggagaaccgggcggagggcggctgcctggcggattgcctccagtgggaagccagagtcagtgacgaccgggtaagggcttcctttgatgaaaccatgaagcgctcatgggaccagagccagatttattacatcggcaaccggtcccgggatttcatgcctaatgccccgggcaccgttcctttctcccccagggaattgcgcctcatggccaagctgcgcatcgactggcggcagtaccgggacgatgcgaaaaatcctcctgaaaaaactgttcaggaaatgaaggaattcctcaaaaaggaattattaaaacaacaacaaaccagaaaacaacaatgaacaaaattgcctgtgcaattatggtttctctctcagggacctgcttcctgaaaggggaaatagctccgccggaaacggaatggaaaggggcgcgcctcatttatgaaggggtctccatccagaacgaggtgactctccctcaaaagggggtcatgtaccatgatgaggataaattatccttcaacattacaaatgccaccatcgagatgactaccagcctctccaagaagccgcagtgcggaaaggagtggtgctacaagggcatcagccacatcattatcaaatattgtggtccgattgccgagcctgacgacggagggaccatctacttcgaaccgacctacaatcatcacgtttggtttgataacgacaagtatggacaatggggaattatgttctccaaagtttatatcatcacccgcatcaaaaatgcgaatatcgaggataccaaagactatggcatcagcggggaggacggaagcatctttttccaatacgtggaaaagatgatggctgaaatgtgagctgcgcccggtttctgcggatgaagattatcgtccgctgattccggtcattcaggcgccggaggtctgtaagtgagggcctccggcgcctttttaatgcaaccggaacccgggttgcgcagctcccggtgaaggcggcatcaattccgctctgcttgatggaaggtacgggcttcctgttcgtgaaaggcaccctgtgcctgggaaacctgatgggattgaaaaagaacaatgcctgggaaggatagtccaagcggcagtatcccggttgctgaaacaaacgccggagggcatgaagcccctccggtttttgttgcgggttgattcagcagtttttagggcgcttcacagtacaccgttccgtaggagtcgctgcctccggcccccttgaatctggctttgaccgtgtaggatgccccctgcctggcttccggaacgttcaggatgtactggatattttccttatgggttccgctctttcccgcatggacgtccctggcaatttcccgcgcgccttcatacagggccgcggattcgatttcaatggcgtgtgcccccttgtcgtagagcagggtcacggtgtatttgccgggagccttgaccagtttggtgacgtcgaacgaatgctcctgtccggacaggtcgtcaggcgtccatgtgccgatctgcggcgtgttgaaaaagtcggacttgtctatccggccgatgacgtccccggcatacttgatgcccatcagggccatgcgttctccgtactccttcaaacgctttttaaaatccgggaaattctttttcccggcaggcgtccagcccacttccgcaaaggcgcaggcacgggggaatgcctggtagtgcaggcgctccgtattggaaatccattccgtccatacctgtgcccccagtcccttgaccctggaatggtactgttcctccagtcccgggaaaatgggctcgaagccgtatgccttttgcaggggaatgctgccgtagctgtaatccaggtaggtggagctgtggagggaattgatgacttcatgcccgtccttgatggcgtttttagccaggtccgtattgcctttccagaagtggatgacggcgttcgtgtccagtttggttccggctttgcctccgccgtccccgttgacgtcatggccgtaaatctcattccagcccatcatgcggcgcccttttttggcgacgatgccggacatgcggttggtgaagtacatctggacgtccgcataactcttcatgttgttctttttcatgaacgcctcaatttccggaacgtctttccattgctgggcatagcgcacttcatcgccgccgatatggatgatcctgctggggaacagcgccacgacttcgtccagcacgtcggacaggaaggcataggtcttttccgaggtagggtcaaaggccgtgttgacgatgaacgtggtgggcacttccctgggtgatttcaagctcaggaacgggtacgctacggcagccgcgctggcgtggcccggcatttcaatttcagggacgatggtgatattgcgccgggccgcgtattgaacgatgtccctgatctgctcctgggtataaaagccttcatgcggcgtgccgtcggacttgccgctgttccacgtaccggtttcggattccctgcgcctggaaccgatggtggtcagacggggatacttcttgatttcaatgcgccatccgacgtcgtccgtcaggtgccagtgcaggatgttcattttcaacagggccatctggtcgatgatctgcttgatggctttttcaccgaaaaagtggcgcgcttcatcaatcatcagcgcacgccaggagaaccgcgggtagtccaccatgttgaacggagctccggaaatattccaccggacggcggatttgtccgccttccggtcgtggaaaatgacgggcatcatctggatcaggctttgcccggcgtaaaaaatgcctttggcatgggcggctgaaagaatgattcccctgggggaggattggatggagtagacttcctcccccttcgcggccagggccgggtcctttttaatgatgatgcaggcggcattctccggcgcttctccgggcgttttaagggggaggggcagtccggttccttcgccgagcatctgctgcaattgcctggcgcggttcaggaaagccttgtcctgcgtcgcggtgatgatggcggacgccggcgtgagctgggcaggcttcccgtggaacaccgtgatttccgccggtttcgggataatttgttcttgcgaaaaggccgcgggaaggcaggcggacagaacgagcgcgggaataaggaacttcatgaatacggtcttaggtacaaatcctgctgacacaatctttcaatggaggtttgttttttggctctggaggctgcatattgttttttccatggtgtcccattttcagaaggcattttatccggctgcgggcggagtatcggcttgcagtaaaaaacggagcgggagtacaacatggaaggatgccgtcctcgtccggatgcgccgccccagaaaacgcctgtccaaccataaatgaatatgaaaacgaacactgcaactcaactattgctggcggcctgtgcgggcgtgctgtcatgccccggcgcctgggggtccacgacggtttgccaggatcagtcctactacctgaagacggcctgcccccatcccctttccctggccggccccacggatgaccgggtttatctgcgcttccagacgggatgggccagcaagtacgagtgcgagggtcttgacctgtgggacggctccctgtgcatgttcgttcctgaaatacagtacaaggaatgggtggggaaaatatggtacggcgtttccacggaccaccggaatcatgcggaattaaagtaccggctggattacatcaaggagctggggaactggacggtgatgccctggtatgagcacagctttgtttttccgggggacaagggcatcccgcgccccggcctgaagacgacctatcatttttccgaccgctggttcggcggcacggacctctactggcagtataacaaccatacgttccgcggctattacgccgtgtttgcggggctgcacgaggagatcgcggattgcgtgagggtggatgccgtggtgcgttacggctacaacggggggtacgtgggcccggtggtgcaccacggatccaacgccctggattacaacctgagttttaccttccgcgctacctcgcgcctgaccgtggaattgttcaccaactacagccaggcgctgaccgtggtgaagcagagggacctgggggatgatttttattacggcctcaacctgaaatatacgttctgacgcccgggccgctccggtgtagcctgggggcttccgcacactttcacggcctggcgaactggaagtgcatccagtcgtaattcctctcgcgtcccagggaaaaggccccctccttttccacgatggaccagaaggcatcgtattccggtccggaaaagacggcttccggcgcgctcatgtacagggtattgcgttcggggtccatgtctatcgcaatgccccacgcgtgcagggacgggcgggagcctccgcggatggggcggttgttgaagcagcctccgtaaacgtccagccgcagttcgcggatgcgctccatgccgtaatgttccagcgttcgctggaaaatcctggtgagcggcacggcgatgaaacggtggcaggtaatggacgcaagctccgtgtccggggaccaggacggcctcagcggatagggcagcggaaccgtaaccagggaggccgggtcccccggctgtccgaagatggaatggccggaaagcacttcccgttccgtgggccagacggaggcgggatgtttgaggccgtacagctggctgcctgaaatgacgcaggcaatcagcagaagcgcctgcttccggaggcgcggggatagccgtggcggaggttgcggcgtgcggtcaggcatgggaaaaggagttggggttcttccggtgtagcaggtttccggcgcggtgcaagacctttgccgggcaggcgccttctccggagggagctgccttccgcgtcttgcggcccttcacggatgaagcactgcaggtattttctgcggcatcgaacatccggaggcgtttttttgtcacaatggaataatattgccgctttgcccatgaattctccatccccccagccccagcctccgccggattccgtctggtacgggtggattttaaggctgttccatcattggaaggtgggggaaaggcaggtcacttacgtgtgggccgtgatcgtgggggtggtgggcgccagcatgtccctgttttttgagtggacggtggaagtgattcaatggctgctcacgggcatctggtcggattcccgcgtaggcaccttttcccaggtagagcctgagtggcgcatgtttattccggtggtgggcggcctggcggccggctgcatcctgctgttcctgaaaaaaaggatgccgggacaggccacggaatacatggaggccatgtccatcggaaacgggctgatcaaattccgggcgtccgccctgaaggtgttttccgcggcatggagcattgcttccggagcggccatcggcaaggaagggcctatcatccagtcctccgccctgatcgcgtccgcggtggggcagcggctgcacgtgtccattccgcggctccggctgctggtcggctgcggggcggcggccgggttcaccacggcgttccatgccccctttgccgggtgcctgttcgtgagtgaaatcatcatcggcaccgtgagcatggatattctggcgcctctgctgattgcctcctgcaccgggttcgccatgctgcacctgctgggggatcccgccccgctgtacagttccccgtttgaaagctttaccatcttttcccagtccctgtggtgcattgcgctgggagtggcggccgccgtggcggccaggggatgggtcagcctgctggatgtagctaccaggtatttgaacggccgccagtccctcctgccgctgcgcctgatggccgccggactggttgtgggggtgctggcggttttttatccggaggtggtgggcaacgggcaggccctgattaccgggctggtggatgaggattacagtacgcagcaggcgtttatcctgcttctggtgaaggtgtccgccgtggcgatcgtgttcggctgcggtacggtgggcggagccatgacgcccacgctgtacgtgggaagcatggtcgggtttattttcagtacggtcctgacgtctctgggcatggagggcaaccatacggtggcgtatgcgatggtggggatggcggccttttttgccgtggcggcccaggctcccctgaccgcgctggtgatggtggtggagttctccatgagcggggaaatgatttacccgctcctgatcggcgtggtgagcgcttatggaacggggcggctgattcgcgcgcggtccatgtatgccgccagcctgtccggcagtccggaatccgtggtcaacctgcccatggcgcaggtccatgtgcatgacctggctcgccatgtggtgccccaggtggcgccggacgcttccctggacgacgtttcctccctgatgctgcggaatcccggagacctgatttttgtggtgaaaaaggacgggacctatgagggtgccatttatccggatgactttctggctgtccgccgacagatggaggagaaggggaagagccctcctcccaccgccggggagctgatccgcgcgggcgcccccgtgctggatgccggcacccatctgacggatgccctgaaattgtttgaacagacccatctgcccgcctttcccgtggtctggaaaaataccgggcggctggatggcgtcctgtaccgcaacgcgctgttccaggtcatcacggaaatgatgaaaagggagtccggcggagacgtgggcatgtgaaacgggaggaaagaggcgccatgcattacaattttgtaaacttcttttctccttcgttcataacatcatcaaagttaagtactagaacgttatctgcatttcccgcggcagctttttccccggctgcatgacggtggaagaaaaagtagttggtctgccaggaccgtacggttaatattcgcccagccccggacttcatgaatgaaataaacaagtcaccggatttggaaatggtcgtgctgcaggaaatcagctccgccattgtcaatgaacgcaacggcacggcgctgctccggcatattctggacgtgctctaccgccgcatgaagatgctgcgcggcaccttcaccatccgccgcgggaatgatctgatgatagaagcgtcccacggcctggacgagcaggagatgaagcgcggccattaccatgtgggggagggcattacgggccatgtggcggaaacggggaggccccatgtgattgaggacatttcccgggattccaggttcctgaaccgtacccgtacccgcaagagcggggaaaaggtggcgttcatctgcgtgcccatcattcatttgcagcaggtgatcggcaccttgagcattgaccgccccgtggacagggaaacggacctggaacgggaccagaagctgctggagattgtgggcaacatcgtgggggacgcgctggcggccagcctgcaggcgcatgaggaacgggcggccctgatggcggagaacgagaaactgcgccagcttttaacaaccaatccgggcgaactgatcggcaactgccgccccatgctccaggtgtatgaacagatacgccaagtggcccccagcgacgccacggtgctgatccggggcagttccggaacggggaaggagctggtagcgcgcgccgtagtgaacctgagcggcaggaaggacaagccgctggtgacgctgaactgtgcggccatgccggaaaacctgctggaaagcgagttgttcggccatgaaaaaggctccttcaccggagccaccagccgccgcatcggccgggcggaggcggcggacggaggtaccctgtttctggatgaaatcggggatttgagcctccagatgcaggtgaagctgctgcgctttcttcaggaaaagactttttcccgcgtggggagcaacagggagcttcattccgacgtgcgcttcattgccgccaccagccgcaatctggaggaattgatggcggaaaacaaattccgggaggacttgtactaccggctgaacattttccccatcgtcatgccggacctctccaagcgcaagggggacatcatgctgctggcggaacactttctttccaagttcaacctgaaatacgggaaagatatcaagcggctgtccacgccagccatcaacatgctcatggcctaccactggcccggcaacgtgcgggagctggaaaactgcatggagcgtgcagtcatcacggcgcaggacgactgcatttacggttacaacctgcccgcctccctccaaatgcccagccatgacgccccgtcttcccgtgacggagaggaccatgcagacttgccgacgatggtggattcctttgaacgggaattgattgtggccgcgttgaaacgctctccgggcaacatgtccgcagcggcgcgggaactgggcatttccccacgggtgctccattataaaatgcacaggctgggcctgcaaaaatcatgaaaggacttcgtcagcttctgtccgccgtttcccggtccttttatttgagcatgcgcttcctgccccgggagatgcgccccggcgtggccgtgggctatctgctggcgcgcgctacggatacggtggcggataccgtggacatggattgccgggaacgcctggcgctgctgaggatgatgggcgcgacggtagccggggacgcctcccgggaggccgccgcctcctgttttggccgtctgggcattctttccaccgtccagacgcaccggggggaggcggagctgctggcccgtttccccgaatgcctggcgctgctggaagccctttccccccgtgagcagatgctcgtgaggcaggtgctgtccaccattgtggaggggcaggcgtgggatttggaatattttgaagcccgttcctcggtttcatgtcccgaacaactggagcattatacctacatggtggccggctgcgtgggagaattctggaccaggctgggccggctggcgctgggatcaggcttcagcacgcagccggaggaccagcttttacgctggggcaggcactacggcatggggctgcaattggtgaacattctgcgtgaccgggaggaggacctctcccgtggaagaagctatttgcctactcccgatgttcagccgtggctggaccgggcggaacgctggctgaaggaaggcgtgttttatgcggaatccctccggaacgggcggctgcgtttttccaccgtgctgcccgcatggctggggctggatacgctggaactgctcccacggcaggaacagccggggacaggaaaggtaaaaatcacgcgcgggaacgtttattcccgcatgtggaaggcctttctcttttcctggaaggaagccctgtagcctacgcggcggttttgccgggttccggagcgggcggagtgacaggggaggctgccggggccggattttccgctggcttgtccgcaggggcatccgccttcttctggtcgttcgcgggtgtttccgcaggattgccgctcccttgtttgggcgcggggggagcgggcggcggcttgggcgccagcaggtcctcccactggtggagcttgaaatcctttcccatgccgccgatgtcatggagcagctcctggcatttggctgtaagcttctcgtagtcgggcggtccggcttccggatctgcggaaccggggaagatcaggtagctgactaccaggtcggaaacggggcggctgtaaggccccgccttggggttgatttcacggctcaggcgcagggagccttcccccgtcttgtagcgcggtccggcgtctcccaccagggccgggtacaacttgtcccccacgatgacgacggcgtaatccccgaactgtggggaaaagggagaggattggttgaccactcccagcgggaccacgatgaacggatcgtattccgagatcaggaaactgtagcgcttcaattcttcaatgacccgttccgcgtggtctatcttgcggcgcagggccggtttttccgcggcggaggctttttccagcgtcttcttgtaggaagccagcctctgctgccagggcttgaggaggggattgggcttgtccgtgcgcttcttccagcggtaggaagtgctgggctggtagaaggagcttttcaggattttatccggcatggtggacaggcggtccccgtccgaaccgtcggaaacaacatccatttcactctgtagccagaggagttttctgcccgtatccggataggtggtttccagaatcgtctccgtatcgtagtaattatggcggtccaggagcttgagcagggaggccaggttcttgcggatttccgtctgcttgcggacgtaaatctgcccgtaatagggggagacccgcgcatgcttgaacagggtggacaggccgggaagcatggttcccagcttggggttgatgttcaggatgtcctccttctttgtcagggccttgggctgcttgacgttcagggtgagggtcatctggtaattgcttttagtctccctgtccctggaagccagggtgccgggctggaaattgacctgcgttttcaggttcaggccgcgtgccagttcgtagatatttgtcatggctccctccgcgggcttcgtggggaggacgggcgggaaggggggatactgcaccggagggagggcaatcgtgcgctccggcgtccaaggcgtggctagccgtgaatcttcaggttcctttccggaaacggatggagtaaggggggacgcaggctcttcctgtccgggctgttccgcagggatggattcatgcggcggataggcgccggaatccgggggcgcctgttcgggttcccctttcagggcccggataatctgggccggatacggtgtgaacagggatgccgccatggttgccaggcagatgcagactgcaagcttgaaccaggtgaggcggggtgttccgcggcggtgtgctttcatgatgctgaagaaggtgaatcgttgggggcaggaaggactttccggggacgcctgcccatgaaaaagcggatcagccccagcggggcaatgctcagcaacagggccgccagccgtatcttcatgccggggaagacacgtgcgcgcccgcaggacagggcgcggaggctgtctttcacgacggtttcaacggacgtgtcaaaggcgttgcggcccggcatcatgtttccggtaaagccggggcgccgggccgcttttccgaagcccgtggaaaccgggccggggcagacggccagcacgcggatgccgtgttcgcgcagttccagccgcagcgcttccgacaggctggaaacataagccttggtagccgcataaacggcaaaatccggaatgggcaggagggctcccagggagctgaggttgatgatgtccccgccgttccgtttcatggaggggatcagcgcatggcacaggcgggtgaggctttccacgttcaggcgcagcagggcgcggattttttcccagcggccgtccgcgaattctccgtaatccccggctcccgcattattgatcagcagggttctgcccggaggaaggctgtccagatgtgaaacgagcgtgtccagggaagcttcatccgccaggtcgcagggaaagacggaggcgcgcaggccggggtggcgtttttccagcgcggcggcaagctggcgcaggacgtccccgttccgggcaatcagcaccagttccgccgcatgaggggccagcgttccggcaaaggcttccccgaatccggacgatgcgcccgtgatgataatcctgtcgtactggaggcgtggggtttgcatggcgggtgggagcggttcgtatcatggtcaatccggtggggaaccgcaatgaaaaagggggctggagaacgcaaaaaaggcgcacctcctttctttccaaagagaaaagagggctgcgccaaccatggcgcttcccctcccggcgaaagcctgcctgcgctctcccgggaatgagggactcccggccctcatagccatgtccggttagtaaaagagaaaaatgagcctaggttcctcttcgaaaagcttttcagtacgaaggcctgaaagcctcctctgctccggggggaaggctttgtgagcgggccggctttcatgggaacatggaaccggtggttttcatccccctccttcgggcagacggggactccatgcaccccaacaaaaaaccgcctgccgggtgaacgggaggcggtttgatgaaaaagaagattattcttaggcctggggggcttcttcctgcacctgcaccacgcggaaaggcacgcgggaggccagttcgccgtcaaccgtcaggtcgatggagtagttgccgggcttttcaaagcgcaggccctggaagttcataatcaggttgcgggtgaagaaggaggcgccttccgggaaagcgggcaccgggaagttgatcttgatgggcatgcgttccttgtccagcggcgtgccgtcggcgtcaacgatgctcaggcccagttcgtgggtgccttcgtcttcaggagtgaggcagatgcgcagggcaacggcgcagacggggtgcacgacggggaactgacgggcgaccagggagtcaaaaccgccctggatgcaaagcttgccctggtagtcggcggcgaagtcacaaagagtagaaactaaaatatccatgttgtgataatgttgatgtatttggctcgctttcgcatggaaagcatgaacattggacagaactatacttcctccagacctattgcaagataaagctgtagaaaatattgtcatttctccgtgaaattccggttgcgcttgaggtaggccgggaatccctgtactactggttccggcaacgcgttccctggcatgatccgatggttttttgacataccctccaagctgattcactggaggctgaatctggtcaggacgctgggcgcctacgtgccgtggctgcgccgggacgacggttccatgaaagtgcatgccggcacgctggtggacctgtttgccaccattctgagcggccgccgccatttgagcgcgcgcgacgcggatgccgcgctggatattctgcgctacaccttcccggaagtggagcaccgctggctttccaaccgtttcgagcgttccatgcgggccaatctgacggtggcggacgtgctggcttccgccgcctccggcagggacgagacggagcgcatggcgattgcgctggaagtgctttccctgctcatcaacacgggagacccccgcatgaccggggagctgtttgaccaggtgacgtacggcctggaactgccgggtacggcaaaccacttgaggcagcttctgatgacgccggacgtggaggcccaggagccggcctacagcgtcggtttttcctccggcattggtgcggaggtatccctgccggaacaggacaagggcatttccttccgcctgatccggtgttcgcgcctggtgctggtggtgaatgacggctccaggcctattgtggcgcgcggccgccacctgccgcccggcggggtaatgccgctgaccaacgggcaggtgatgctgttgccgtcaggtccgctaagctttgaagacttcgcgttcttcctggattgcaagcgttccggcaagcaggaagtatgctatatttccctggacaacggcgccttgcaaatcagccgggtgcgttcacgggccagcgaggtgcgcgtgaacatggggctggcgtgcagggtggaggttctgaggccggaagtggaattcgtagtggacgggcggcgcctgtaccccggtgagaacgtgcgcatggcctactattcctccttcacgctggacggggaggggcctttttccatgggggaggtgcagaactccatgtcggacatcgggcgccgcttccgcctggaccccgggacccgcaagctgcgcgtaaccaacctgccggaaaaggcgcgcaagggggacatgctgctgacgccgggtctggccgccggagtggtgctggaggtttccttttccagcgccaccaattccggctggctggaagtggtggaggcttccatgcctctgctgctcaatggcaggcccgtgcggggaagggtttccctgcgcgacggggacgtggtgcacctgaacgcctaccacgccttgcgctgccgtttttccgccggggtgctggatgaagaataccacgccatcagaaccctcagcgtggagggcgtgaccaaggaattcatgcgttccggccgtgtgctggacaacattgacctgaccgtgaagcgcggagagatggtctgcatcctgggccccagcggatccggaaaaagcacgctgctctccatgctggccgggcagcttccgcccacgcgcggctgcatccgttacaacaaccagcttctgtacagtgccccggacctcatccgtccctacatcgcctttattccgcgggaggacattctggacgcggccatgagcgtttccgagcacatcgcccaggccaccatcatccgccgtccgcgcctgacccggtcggagcgcgtcaggcgggtgaacgccattctgaaattcctggggctgacgcacatcgcctcccgccgcgtgggggagatgaatgcgcgcaccatctccgacggagagcgcacgcgcctgaacctggggcttgacctggcgggcattgcggacgtcttcctgctggacgaacccatcagcggcctttccacctccgacgccaagctggtcatgcagaccatgctgaacatgagccgtgacaagatggtgatcgccaccatgcaccggcccagcacggccatcctgaaccagttccagaaggtgctggtgctggaccacggcggccagatggcctactggggggacgtgccgggcatgatgcgctatttccggaaggcggctgtggacatggccattgacgtttccgaggaggcgcggacggccggcggcgcggactacgtgtttgaagtgctggaagcccccctttcctggcatgaccgccgcaggcggcagcacccccggctgtggcaggagcgctttgaaggctaccggttccgcaacgtaatggggcaccaccatgaaggaggggcgcccagaacgttgtatgaaggcacgctggaattcccgcctgccccccggcgcagcgtgatgcagctctggcggcttttccgcatctgggccgtacgcaccttcctgggccgcgtgcggagccgcatggggctgtacaccatgctgctggaagggccggtgctggccctgctgatttccctgaccctgcgcgcctcttccagcccggaatacacgtttgccaccgcccttcacataccttcctatttgttcctggctaccatcgtggccatgttcttcggcctgaccggggcggccagcgaagtgctcaaggaccgcgccctgctcaagcgggagagcaacgccaaggtgttcgtgaccggttacgtgctcgccaaggcgctggtgctgacggggctttccgccgtgcagtccgccctcttcctgtgggtggggaacgccatcctggaaatccatgaaatgttcctgatctacctggggacgatgaccctgacggccttcatcggcgtgagcctgtccctgctggtctccgtctttgccaaaacggagcgcgcggctctcaacatggtgcccctgctgctgattccccagatactgatggccggggccatcgtccactttgatgaaatgaaccagttcatcccgtggtccgcccaccgcacggatgaacacgggcgcctcaagccgggccgcgtgccgctggtggcggaattctgccccctgcgctactcctttgaaacgatggtggtggaccaggcatccaaaaacgtctgggaaagggagcgtgaaaccattcaggagaaagtggacgagctcaaggagcagccccaattggacaacagggaatttgaggaattcaagctgctcaagatggcgctcctgcacatagccgccatcggggcggacgatccggaacaggccaaggccgcggtccggcgggtacggagggcggcggtcaacggctatgagaaaaactacaggcaggtgattgcggaactggaacagcaggggaagggcaagccctccgttaaatccttttacgtcaatgaccgcattgtgatgctggatgaatccgcggaaatccagcgcgtcagccgtgatacgctggaccgcccggaaattttcctggcgcgccgccagcccctgccgtggggcaacacggggaaggctccggacgatcccggctacagcgcggacgaaggaacggtgcctaccccctggaaggactccctgctgctgttcctgatgggggcggcccccctcttcatcacggggcgcgtgctcaagcggcgtctggaaaaggtcaggtaggttgaccataagacgatgctgcttatgcatggacgctgctggaagaggcggagaggggtttccgtatttcgcgtgttttgctgtgctggggaagataaaccaggccgtccgttcttttccccgggggctttgagtccgcggaacagcatgaagatgcagatcaatgcagttattttgttgacgttctcccaagaatcactatcttgaaaaaaactcattttccattatgtttgcccgtgtatttaacaagtattctctctcctttttgtctctggcggcagtgtctgccgggctcctgtcctgcggaggcagcggcgatagtggagaaggaacctgtcttccctcaggcagcaggctgaatatggtagtgccgattacggatcaggtgaacccggataacgcctcctctctcatcatccagctggatggcaatgataccgaccttcctctggcgaagattcagggagccgctgccggtacttctattcccgccacgacccacatggtgtacagaaggacgactgcggaaaaagcttctctggtgggcaacttcgtgattgctcagggccaggtcactttgcctggtccgattgtggtgattttctacggctccgttcaggtgaacatggacatcacattcaatacctcttcaaagtatgaaacggccgagggtacgtgtacgggcaacgtttcgttcgtgagcggcattcagaacggagaaggagatattgttgccgggaacccctgggcgggaacggatggcacggtgttctattatcctaccggtaattgagtggcccatgagtcacagtttttatattcaaagtgcggtcgttcgtgaaggatggccgcgcttttttttgcaggaaatatgttgaaaaattggggaaaattatgcctggtgacattttcgtgcatgctggcgtcttttttgccgcatggcttcggaacggagactgttccgaacgttcaagaagaagttccggaaacagccagggactgctacatcaatgtattcagggccaaggtcgtccctgagaggatacgttcttttagcatgccggcggacggcatcgtcagcaactggattccggcggacggccgtgttcggcgggataccatcattgctacggtcaatgaggatgaaattgagatggagcggagggagctggaggtcaaaattttaaaagaccgtatcgccaaggaggaggaactgtccgaattggagaaacaattggaagaaatgaaattttattcttccctgtccagggaggaaaggcagtatgccagcaaacagccggaaggcggccaacgggcggaaaaatccttgaaggacaagattgaactgaccaaaaaggaattagccatggtgggggacaaggccagattggacttcagcaagaaagaggaaaaatacatccttaaaatgccctttgacggcaagctgcagtaccagttttccttcccgcgggacaacagcgtatccctgtatctggatgcggcggcagccattgctaccgtttgtgatgattccgcctattatattaccatttccatagcggatcctgatttgaccaggctgccgccggaatcattatatctggctgttcccatgagtgacggttccatgctgcgggggaactttgccttcaagcgtgtagaaaaaaacacttccagcgggggggatttactggcttattttttccgcctgtctccaaaggatcatgaccgggctcacgccatgctgggttccaattgcacggccaggctctattattctccttccggagaggtgattcgtctcaataaggttttgctggcctccagtccggaaggaaggaaatgttcctcctggcaggaactgcttgaaaaaacgcatccggatatggagctgatcgtaaatggagaaacggaattgattgtacggaaaaaatgaaattggcatgtgaatccgtttatttcagctactcgggaaagcaatggatttttgaaaactacagtaggcttttttcatctggaatcactattttaaaagggtattccggatgcggaaaaaccacgctgctgaaacttttggccggttatctgaaaccccagcgcggaaaggttcttgctcccggccggcgttctctcactgatgctctttatcgtcggaaggaagtaagttacatgtttcaggggatcaatctgctgcctctggctacggtggagaggaatcttcaattgtgtgcggagatggccatgctgcctaaaaaacagtggacacaaagagtggacgacctcgtggagcgtttgggattggaatccctgcgtcacaagaaggcgggcagcctgtccggcggacaggcccagcgtgcggctctggcccgtacgctgatgaaggattcagatattctgctgctggacgaacctacttccggtctggatgacagcaatacggagatcatcaagaaattgatcagggaatacccgtccgataagatatgcattttaagcacgcatgattcccggctctttgacctgactcatgaaatcattgattttaatcagcctgtatctctttaaggatactctgcaccggtggagggaaaggcccgccagcccgctttcccgggtattggtagcgtttttcctctccctgtgcgctctttcgtttcttgcgaattatgttctttctgcaaagatgctgcatgatgagatcaaaagaaacggggctgatttgattgtagtccttgataccgtgcgcgacggtgaaccttccaaaaggaatttgcttcagcatgaattgccttccttgtatggctgcgacgtcctggcgttaaaagatgctcccgcgggattcgcccgtgtgggaaaggcggttttccccattctggaatacaatatggagtcctgcttttatcttgctgatctggggctggaggaagtgccggtcgtccttttgtttcacccggacaggagttccctgcatccgggaccgtgcagagttgtcatcggggattttgacttttcattgaatgcatccccgttgccggagaaccaccttttagggaaattatatccttcaggagtggtgctggctccggaaggagctttcaataccgggcaggaggcccctataagcaatgaccggtatgtaatcagggttcatgagatgacggcggacaatatccagaatattgaggaaacgcttaataatatggtgcgctatgacgggagcatgacgatggttcagactcatgtgagcatgttgaagaggttggaagtgctgatgagcaaccagatggaatgccggaccggtttttctatcggcattgcggttattgtaggaattcttctgattgccctggcgtctatggaattccggcagaacgagtatgtctatacattgatgaaaagttttggggtgcgtccggctctgctggtgctgacatttattgtggagaacatattcctgataggaatttcttatgccggagctgtatgggccttcatgaagactcaaaagattgtcctgggagaatttttcaagctgggcgatgcggtgttgacgtatgcggacatacggcaggatttgtggcttttgggagtttcacttttgatctgtgtgttgctttcttccgtgccggttgccttctctgcctatcgccctattgggaaagtgttgaagtaagcagtgcgcatgccccatgcctgggggtaaataattgttcctccttcgtttggaaatgcggttttttgatacaaaaaggcctgcggaggaagtccgcaggcctttaaaagtcagagaatgagttctggttatttattgaatttcgtcagagtaccgggccggtcggtaacggcaggatcggcaaaatagggatcagacagggcgcatgtagcggttcctgtgcctttggttacatttttaacgtcggtcatgatcaagtagcaggggaaggcctcttcaccggctctgttggtgtaccagtaaaaagctatttcagcggcggtgtcatcagcgggaacatagcctctgacgtgcatggacgcgacactgggctccgcgctttctccggaatagatgttggcgttgtgtgtggaaacaacgtcaaaggcaaccgtatatacctggttgttttccagggagatttctacattgcgggctgttccgacaggaatatagatttcttccgttttactggagcctccgcaacctgtgagcacggacgtgcacaaaaaggaggggaggagcagagatgccatgatgcaaaaacgagtattcatatagatggaggatattgaaattatatgagtaagacggaaagggatgattagttgctgtaagtaatggtgacgtctgcactgacgccattgagagtttgcatttcttgtcctgcgggctggcgtgaaagcgttcctccttcgccgcctacggatgcgtgggtggattggtcaaattccagagcagggaggtccatggaatatgccgtagtattgtttttccctgcaatccagcgcaggttcagagtagctgcattattgcccgtcttgtggtaaatcacggttggagagccattccattcttcaatattctgtccacgggtttgaagactggactgtccgttggtggcggtgatcagttcaaaaatattcgggaaatccgatgccgttattcccagcctgatagataatacggtaccgttgagggtatcgggggcattgccgccgctactgctgcttccgccgcattgcgtcaaaaagagaagtccaagggaacagcaggccagggagattttctgggaaagagggagcataacaaataactgtagataatgtttattgaaggagattgtagtatttcctatgatctgtcaaggaaggaaatttggaaaatggaacccctttcagaaaggggatggaagaggatttcggcttgccattgctgatcttcctccttcctccttttcccggttctgctgtgttggtacttgacttttcagaggcagaagttatgaaacgggcaccagtatgctccttttctcctcggtttgcagctttttctggagtccattcagagtggctcggtggaggactctgttgggtttctgtatttgcgccgttgcatgtacttcctgttccgtggataagcacatggaaagaaaaacggtggagctgatggataaaatggctgccatccccaactgggatgaactgccccggagggaaatctcatgggatacggcaatggccgtcatgatggagggaaatttggatttgaagcgctcggaacaggctctcagggctacggaacgttctgttatcagcgtatatacccaggtcattccgggcgtgaacctggattggatgctgacaaaagagctgagcgagctgacccgtgtaacagcgcaggatgtagagtataataccaatattctgtttaatatgccgtccctgacgcagataccttttgattattattcggccaaatccgccgtttatacggcccggaaaaccttggagatgaaaaaaagggagctggtgtccaggctgtaccggcaggtactttcctatcagaatgcatgtgtcagccataagaaccggctggatgccgtgccctatgacgatgatggagttcagaagaaattgatccaggatgactgggagaagagagtgagtgaaatttcccagggatttgctgtcctcatggggaatatggatgcccagtggctcgtcaggcctgaaacgatgcccagggtggactggaggaaatacaagagtgcttcccgccatttggatttgctggtggtgaccatggtagccatggaattggaagcttccaggttgcaggttttaaatgccaagatgaagtttttcccatccgtggatattaatttttacagccctaccttgttttccagtacgggcggcacttaccaggggttctttgcaggcgccggagacatgcaggtgaatatgagcctgcgtgaagaattggacacccggctgacctcctggttccaatacaagacggccaaggaaaatcatgatctgatgcagaaaaaggttgtgatggatttgcagcagaggcgcatcaaggtggccgcgctgatggagagcaggaaaaggtttgaaatctggaagaaagtcattttgaaggaaattgagtttaaaaagtccaggatggctttatcaggcaaggaatatctggcgcaaaggaaggatattaaaaccatgcatgagaatctggatgcggaagccgccaagaatgcggaagtggaagcggcgctcatcatggagtacggctggctgaaataaggggaaggcggagcggccctgtgtgactgcggtgccttcctttcttgatgccttcaaaggcttgtgttacggtccggacatgcaaaaagttcggcagcccgtaggcatggcgttgatgattctggcttttccggccgccatttacggggcgttcccgtggggaatcgccctgggggcctttttgttcctgctgggggtggccgtgtcggtcagccgtttttccgccattgtctggtcatggtgcctgttttccctggggatttatctggccgcgccttttatctggatgtggaatccggactattttttcagccgcccgtttgacgttctgttcgtgagcggctgtttggtgggcagtctggttctgctgacgatccggtttgcggtagttcccgtgctgtggcctaaaatcttccgccattttgtagagggaagccccacgctggaggacctggctccggagaagggaaggacggtggcggaactgcggaacggcattaaacgcaggcaggtgaatttcctgttcgggcatgcggatgaggaactggtggagaaatgggggaaaatagcccagggcatcgcggcgctttccaggagccgtaaacggctggcggcttgggtagtaggtattcttctggtctggcccgcagccgtgtttttcctttccggaggcatgggcggcgcgctggaccgtgacattgaccgcatgtgggaaacccgtccgttccgcaacagcatggtggtttccacccctgcggccatgaatgcggcgcggcgcgttttcaaggatgcccgcgccctgcggggaatgacgatggaacaggcgcgcacgtggctgaaaacggaccgcaggaatgccgccttcaagctgggcaagccccgttacgattttgaaaaggatgaaaccgtgctggtgctttcggacgggcgggattccattcgcctggtggcggtcttcaatgacgccgggcagattacccattcctggccggaagaatacatgacactgatggtcagggatttggagaaaaactaaatgctggagacaaaggtttgaataggacctttgagctttggtgtttggcccttgcggaacccctgcggatttccgctacagcgtgcgtttttgcggaggcgtcaggttcagcctgccttcactgatgtggatgcccatgccgctttcctcaatcatgtggatgagcggcagataggcctggagcaggttttcgaatgcgggaaggagaaagatcatgtagccctgggggacggaaaggctgccgatggtgccgcccacgtggataccccccggcagagtctcgtcattgtagaattcaaagcgggtctgcaccgccatgtagttgtgcgggtccatggactggaagggcgtcaggaacagggaaatcgtctggcgggagtcgatgcccgtatagcgttcaatgatgatttccatgcagccttccccgatggcgccgtccggctgttccttgccgccgtgcagccggatgcctaccgccggattggtggcgaagatggccagggctccgtgctgctgcggatggacggaggaggccaggtagcggttgatgtcttcttccgagaaggaaacggaggcgtccctgttgatggcctgtttcaggattttggggatgtccggagcgttttccttttggcggaagccgggcaggtcagccgtgttctgcgggctccaggaggaataaatcagccaggaaatagccgccagaatggctatggtgaacaggaagatgaggttgccgatcagggagaagggcgttttttcacggacgggtttctcctggccggcctgttcctccggatcgtagaaatgttccacgatgttttcatgttccggcaggtcgtgcagggattccctgccggcggagccgttccgggtggcgccttcgttgtcggagttgggggacatggtgcggaagggttacgggagtctggggaatttggagaagtcgggtgcgcgtttttcgacgaaggcgtttttgccttccttcgcttcctcgctcatgtagtagagcagggtggcgtttccggccaggtccagcaggcccatctgtccgtcgcagtcagcgttcagggaggctttcaggcagcggagggccagggggctgtgccggagcatctggcggcaccaggagagcgtttcctcttccagcttttccagaggcaccacggtattgaccagtcccatgtccagcgcttcccgcgcgtcgtactgcctgcacaggtaccagatttcccgagcctttttctggcccacgatgcgcgccaggtaggaggagccgagaccgccgtcaaaggagccgaccttgggtcccgtttggccgaatttggcgttgtccgcggcgatggtgaggtcgcagacgacatggaggacgtgcccaccgccgatggcgtagccggccaccatggcgacgacgggcttgggcatggtgcggatggtgcgctgcacatccagaatattcaggcgcggcacgccgtcttcaccgatgtagccggcatttccgcgcactttctggtcgccgccggagcagaaggcgtcagggccttccccggtcaggatgaccacgcccaccttggggtcttcatgcgcggcgttgagggcgttgagcatttcatgcacggtctggggacggaacgcgttgcggacttgggggcggttgatcgtgattttcgcgatgctgccgtcgtccgttgtttcatacttgatatccgtatattccctggcggtggtccattgtgcgctcatgcggactactttaataaggcgtccgtcaatgggaagcttaaaatgcgccgccttccgggtgtatgcggacttgggcggggggaaaggcggcggagcgagggagcaggcgttttttctgcgttttccgggagacaggctctggaaaagcgtggacggagccgggcggcaatctttttccttcatcccggttttccgctgcttttccggaaggcttcccggtgacggaagctggcggcatttgtaatttacggcatgcgcttctgtgctacattgggaacggtatgatacatgacctactggtgcgcggcgtgacggtgtttcccgggagcgaacattttgagtttgtccccggaatcaatgtggtggtgggcggcaatgattccggcaagagccatctgctgaaattgtgctataccgtagccaagtggagcgcggacgggggcaggaagtccctgccggagaaatgggcggaggaacagcggctccggaaggacctgatgcgggtgtttgcgtcccgcggactggccgggctgacggcacggaaccgcgggaacgcccatgcccatgtggaggcctccatggagggggacggggtgccggaaggcatggggaacctggtgtttgattttcaggcggggcatgaggaggaggggctgagcattcaggagatgcccaaacgcttcctgaacgtgccggtggtgttcctggcggcgcgggaggttctgaccatttacccgagctttgtacaggtggggagcaggttccccgagttcctggacggggggagctgggacctctgccgttacctggacgtggatgcggcagcggaacctatcagcacggacgccgggcgcgtggtcgccaggctggagaagatcatcggcggggaggtggtgaagcgcgacggacggttctttttgcagcgtcccggacagcagccgatcgagatgagcctggtggcggagggcttcaaaaggctgggcacgctgagctacctgatccggaacggttccgtgaaaagagggtccgtgctgttctgggatgagccggaaatgaacctgaacgcctcccatctgcccgtgctggtgaaaaccctgacggggcttgccaagacgggggtgcaggtgattctgtcctcccacagcctgttcctgctgcgggagctgatgattcagctttccgaaccccgcaatgccatggtgcagaggaagtttttcgggatgagcgtgccgcggggagaccgctccggggtaaaggtgacctggggggaatccctggaggatgtggggcctatcgaatctcttgaagcggaaatcgagcaggcggacaggtatttgaagctgagctatgagtcataagccgtcagaagctcattacgtggagggagtccaccgtttctggatcgatgaaggctacgtcgtgtgccgcattgaatgctcggactattatgcccggcaggcgcagaatttctgcggggggtgcaaggagatggacttcctgctgtatcatccggaacgccgggatttatggctggtggaggtgaaggactaccgttttgacgcccgtcccaaggtgggggaactggtctgcgccctgagccgcaaggtccgggatacgatgtttcttctccgggccgcttccgtggccgccccgcatgaagagccggcggagggcatttccctgagggatttttccattctggcctcggaggcggaaacgcttcacctggcttttctgctggaaatgggcatgggcggcgtctggacggacggcggcctgctggcaaacgtcaagaacctgctggtgggctccatgcggtttctggatgcggagctgatctgcgcgcccatcacgtatccccaccgcatcggcccgtggcgcgtgacctccgcccacggggaggtgagcaagcgggtggaaatccggcgcgccaggaaactggcggaaattcaggaacagcggcggcgggaacggctggaggcgcaggaggagagcgcctggcaggaaaagagccggaaggggagcggctttcatccggcggaaacggcggaaaagatgccccagtggaagcgccgcctccagcagcgcatgaacggggaaagcgcgaatcacgagggacgacgcagaaaaaggaaacgggactgaatcccgcgctgtctattgcctcattgccggaaggcgcttccgggcccggaacggtccggttccatcctgcgccggctgtatggcatgtctcggaaaaaagttttattttacaaggactcgcgtatcatgccgcccgattcattaacttctgtgtgctaaccacattatgtctgacagaatgccacccagtcctcctcgtcctcccaaatttcccggctccggaaagcccgaatcccccaactggggcgtgtgggtcatggttcttctcattgcaggcgtcctcgcgttcggatttttcaccccggaatcctttggactggggccccgcaaggaaaacctggaatcctttgaagcccagtacaaggcgggccgcgtggtgctgaacgatccgaaggcccccgtggaagtggtgctgagcgagaacggctctgaaggcgtcatccatgcgctggtttataaaaaggacatccagccgaaggtggaaatgaaacccttcgtgctgtcctattccatgtccctgccggaccgggacaagcccctgctgaacgagctttccggctacaggatggtggaaagcccgtaccggacggaggcggggaaaaatgtttccattattcctgaagaagcgcagaagctttccgtgcccgagttcaaccgtctggctctggaaggccgcatcgcgggcggaaatgagggccttctcctggcggaagacgggaaccagaacgtgctggtcggccagattgtcacccgcatctggcctgcggccacgggggacgcctccgtggacaagcagcgttttgaacgcgtggaagtgccttttaccctggaatcccagggagaccgggtcaaacagttgctgggaccggatacgaagttcaagcgcgagtccggctcctggggcggcattctgctgaacctgctgcctatcgtgctcattctggtaatcctgttcttcatgttccgcgcgcagagcggcggggccaggggcgccatgagcttcggcaagagtcgggcgcgcctcatcgccccggacaagaacaaggtgacgttcaaggacgtggccggcatcagcgaggcgaaggaggaggtatgggaactggtggaattcctgcgcaatccggaaaagtttcgtgacctgggcgccaccattccccgcggcgtgctgatggtgggctctcccggtacgggcaagaccctgctggcacgcgccatcgccggggaatccaatgcatctttttattccatcagcggttcggactttgtggaaatgttcgtgggcgtgggcgcgagccgcgtgcgcgacatgtttgagcaagccaagagaacggcccccagcctgattttcattgatgaaattgacgctgtgggccgtcagcgcggctacggcatgggcggcggcaatgacgaacgggagcagacgctgaacgccctgctggtggagatggacggttttgaaaacaactccaatgtgatcgtaattgcggcgaccaaccgtgcggacatcctggacccggcgctgctccgtccgggccgttttgaccggcaggtggtggtgaaccttccggacgtccgggggcgcgaacaaatcctccaggtgcacgccagaaaggtaaaaatggctcccggagtcggttttgcgcgcattgcccgcggcacggccggcttctccggagcccagttggccaacctgatcaatgaagccgccctgctggccgcccgcaagggattgaaggagattacggaagcggaactggaagaagcccgcgacaaggtcagttggggccgcgaacgccgcagcctggcgatcaatgaacgcgggcgccgcattaccgccgtgcatgaggcgggacacgccatctgcctgctgaaaacgccgcacagcgaacctctgcaccgggtgaccatcgttccccgcgggggagccctgggcatgaccatgtggcttccttcggacgacaagatgcaccagctccggtccgagatgctcgaccagctcgtcgtggcgatgggcggccgctgcgctgaacaaatcgtctttggcgacgtgaccagcggagctaccggagacatcaagagcgccaccagcctggcccgccgcatggtgtgcgagttcggcatgagcgagaaactggggctgatcgaatacggcgaacaccagggggaagtgtacattgcccgcgacctggggacgcgatcccgcaattattccgaatccacggcggaactgattgactcggaagtccgcttcctggtggacagcgcctatgaacgcgccatgaccatcctgacggagaaccgggacaagctggacatgctgacggaagccctgatggaatttgaaacgctggaaggctcccaggtcatggacattctggaatacggggaaatgaagaatcctcccgccaaggtgaccccgcctcccatgccttcggaggtggaagagcagcccgggaagggtgattccggttcttccgtgaagaaggatgccgaagaagaccatgcggaggaacggaagaaggagagcggccagacggagcaggaccccttttcctacaatcccgtggaggagtacggcaaggacggcgaagagaagaaataatccaatagaaacgaatcaattatggtagccaacgatgcgatggaactggccaggatgtgcgcccgcgccgcggatgacgccaaggctgaaaatgtgcgggtgtacgacctgcgcggcatgtcttccctgacggatttcatggtggtgtgcacgggcttgtccgtcccccacctgcgcgccgtcatccgggagctggaagaatccgtccgggaaaagacgggcgccctccccacctatgtggaagacacgcccgtggcgctgtggtccgtggtggactacattgacgtgatggttcacatcatggggcaggaaacgcgcgaattctacggtatggacaccctgtggaaggatgcccccgtggtggagtactaacccccggtgatctgaattttccgccgtgcctctgtctgacagcggcacggcttttttatctttctggaggggggggacggcttgttggccgtccgtcggagcaaaggaatcggtgacaggatgtttgcgctcctccacatgatgggggcctgatccggcccggaagaaaaaaggggcaatgattgttgcgtcagcgcattttctttaccagggatttgggggcgctctccccggtttttccttggaaaagcggcatggcggcccggttctaacaagattccaatcttgccttgcagccgcaatcagattactcttccaccgttatttatgagtaattccggacctacctccaccccgatgatggatcagtaccttcgcatgaagaagggcttgccggaggacgtcctgctgtttttccggctgggggatttttatgagatgttctttgaggacgccaaggaggcttcctccattctgggcctgacgctgaccaagcgccacggcattccgatgtgcggggtgcctcaccacagcgcggaagggtatattggccgcctggtgaagggagggaagcgcgtggcgattgcggagcagaccaccattccgcagccgggcaagctggtggagcgggagctgacccgcgtgatttccgccggaaccctggcggatatgaatttgctggattcttcccgccacaattacatcgtggctctttataaggataaaaagcatttcggcctggcatgcgtggaccacaccacgggggaattttccgtggcccagtttgagcacatggacctgcttctggacgagctgtcccgcatcaatccttccgaacttctggtcagcgacgagcagacggactgcttccccggcgcccatcccacgctttattacgacgggtatacgttcctgccttccacggctattcccaatctgctgagccacttccgggtgcattccctggacggcttcggctgcggggagatgaccgccgctttgggggcgtctggcgcggtgcttcattacctgggctaccagctccgccgccctacggaccatttgcgccgtatttccgtgcgcgccacggagagcgccgtgctgattgaccaggccagccagaggaacctggacctggtggattcccgcggcggcgtgaagctttccctgctgggaaccctggacaggacgagcaccccgatgggcgcgcgcaagctccgggactggctgctccaccccctgtgcgacctggaaaagctccacgcgcggcaggagatgatctccgttcttttgcaggaaccctacctgatgagcaagctgcgggagagcctgaaaaacgtccgggacatggaacggctgacgggccgcatttcccagggcgcagggaacgcccgtgacctccaggcgctggcttcctccctggggcgcattcccgcgctcagggatgatctggaatccctgcccggaggcggggagatgctggaaagcatccgctcccgcatgggctgctttgacgagctggtggacctgctccagcgcgccctggtggatgagccgcccgtgacgatcaaggagggcggcatcatccgggaagggtaccacgccgggctggatgatttgcgcctggcttcccgcgacgggaaggagtggctggcccagctccaggagaaggagcgcaggcggacgggcattgattccctgaaaatccgcttcaacaacgttttcggctactacattgaagtaaccaagagccattacgacaaggtgcctcccgactaccagcgcaagcagacgctggtgaatgcggaacgcttcgtcaccccggagctcaagcagatggagaataccatcctgggggcggacgaacgttcccgccaggtggagtatgaacagttcctgctgctgcgggaggaagtggggcgccacattgacggcatccagattacggcggacgccatggcggacctggacgtgctgctggggctggcggagggcgcgcagcagtaccagtactgccgccccgtgctggacaattccatgaccctgcgcattgtcaacggccgccatcccgttatcgagcagaatgtttccggcgacgtgttcgtgcccaatgacgcctttctggaaccggaggaaaaccgcctcatcctgctgaccgggcccaacatggcgggcaagagcacctatatccgccaggtggccctgattacgctgatggcccagatcggggcttacgttccggcggagtccgcccacatcggcctggtagaccgcattttctgccgcgtgggggccagcgacgacctggcgcgcgggcagtccaccttcatggtggagatgagtgagacgtctttgattctgaacaacgccacggagcgttccctgattattctggatgaaatcgggcgcggaaccgccacctttgacggcctttccatcgcgtgggccgtggcggaatacctgcatgacgagttgaagtcccgcaccctgttcgccacgcattaccatgaactgacggacctggcccgttccagggccggcgtgcagaattacaatgtggccgtgcgggaatggaaggaggagatcgtgttcctgcgcaagatcgtgcagggggcggcggacaagtcctacggcatccaggtggcccgcctggcgggcatgcctgccgccatcgtggaccgcgccaaggccatcctgtcccatctggaaatgaattccacgcggccccggaaaaaggaccgcgcccgtctggcggaacccagggccaagaatacggatatggacgacgatatgcccaccggggagtacgcccagctggagttgttctgatatgcctctgcccgcagacatgatcggcggcctgcgcttcgccgccattgattttgaatccgccggggcggcccggggggagacggaccagcccgttcagataggcattgccgcctgtccttccctggaaggggagccggagctgtggacgtcctatatttctacggacaaacccgttttatggtcggcctcccaggtgcacggcattactacggagatgctggcggatgcgccttcctttccctccctgtggccggctatccgttcccgcctgggggacgccgtggtggtgggacataaccccgccacggaacggaagttcctgcgccgctttccggggcacggcttcgggccgtggctggatacgctggcactcgggaagatgtgcgtgccgggcctgccggattattccctgtccaccttgtgtgattccctggggcttactccttccgtggatgcgctgcttcccggccgccggtggcatgacgccctgtatgatgcgctgggaagcctgctcgtcgtccggttcctggtgcgggagctgaagctgtcctcccagcccctggaggtgcttggcagggcgttgggaaagtgattttccttttctcttggaaagattggcctgccgtccatgcgtattacagggaagatgaaagctcccgtttttcttgccgcttttctgctcctgtccctttcttccgtttttgcggagaagcccccggcagggattatcccggatcccccggacgtccccaggatgaacacgcagcactgggttcccgcccgttacaaggtagtccgggagcagttgctggggaaggagtgcggcatcctgttcgtgggggattccatcacgcagggctgggagcaggaaggcgcggaatggtggaagaaggtgttcctgccgatgaaggcggtcaacttcggcgtcagcggagacaggacggagagcatcctgtggcgcatggaggatacggagctggcagtcaaaacgccgccgcgttactgcgttctgctggccgggacgaataacatcggccggtgggaagggaagcagcccgcggaagaaacggtaaagggcatccgggaagtggccgtgcgcctgctgaagaggttcccggaaacccgtctgatcctgatggaggtgacgccctacggtcccgatccttccgcacccctccgcaagcggcaggaggagatcaatgaacgcctgcgcggtttgaaactgccccggaccaccattctctccattaacggacgcctgttgaatgcggacggaacgttccgggaaggaatgttcagagacaaggtgcacctgacggcgaaaggctaccaggcctgggtggaggcgctgatgcccctgctgaaccgggaaggctgagttttcccggtttcttgtccgccttgccgttgcttttgtggtccggactggtttccgtctgcggaaaaggccgctttcagcggtccatttccgtttccaggaattccagcaggtaggagggggacaggagttcccgggtgacgaccggttttttgccgggcaggtacagggcgttcacgggaaccgccgtgcgtcccaggtttttgagttcctggtcaatggcggggttcgtgcgggttttgtccgccttcatcatgacaatgccgtatttcctgaaggcggccagcacttcatccgtgtaggatgccttgttgacctggcaggtggagcaccaccgggccgtgaagtccacgtaaacgggctttccctctttcagggcggcctgcatggcttccgggctccagggggtccacacgcttccttccgcctggcgggcgggagccgtagctgcggaggaatccgctgttccggaatccgctccgcggccgaaccaggcggctccttccggggggagcatgtagtacaggccggccagcaggaaaatcacggagaaaacgccccccgtgatgcgggatttccggctgcggtacatggggcaccatctgccgtacacccagaaggccatggagaacagcaccaggccgaagaacaggaacaggatgtcctgcggatggttgtccgcgtcaaagaacgcaatgtaaatccacaggaagtaggcggcggtgccgaacatcaggaaggacatggactgcttgaaggattccatccacgctcccggtttgggaaggtatttggtcaggacggggaaggctcccagaatgatgtagggcagggacatcccgaggcccatcatggtcaggcagagcacgatgcccagcggaggctggagcatggccgcgccgatggcctgccccaggaacggcgcgctgcacggagtggaaatgaccgtagccagggcgccggaccagaaggagccggcatagcccttctggtgctggaggtcgttgcccatggtggtggccttgacgcctatttcaaaaacgccgaacatgctcagccccatggcgagcatcaggcccagcaggcagaagttcacccaggggttttcaaaccagaaggcccagttcacaacgccttccgcgccgtggcccagccagaattcactgctgaaaatgccgggtcccgcaggggcgccccagtcgaacatgttcgctttcagcgcaatcaggatggccgtaatgatccagaaggagatcaggatgcccagcacgaaggtcagggagtgggccaggacttttttccgttccccccctcccagctggacgaagctcatgatcttgaggccgattaccgggaagacgcacggcatgacgttcaggatgatgccgccgatgaacatgaagaacatgatttcccccagtcccatcagcggcggcgcgggaacgggtccggaagacgcgggggaggcttccgcggctgttgccgccgcctgcgctctctcggaaaaggggcggttgtccgccgtgatgctgacgccttccttccctgcgcgcaggatgccggaaaggctggccagcggttttcctttgtccgcttccggcaggttgttggggtaaaggccgtccgtagtgtcattgtactgcatggccagctcgtagttggagccgtccagttttttgaaggtctggggagtggtggggttgatttccccctggtcgcagaagaaataaacggaatcttccggaaccggttgcccgttcgtcctgaggtgcagggtgacggtttttccttcctgggaaatccgggccttcagtccctgcgcccatgcgggggtggaaagttccgccatgccgccggacagttcggccgcgtcgggggcggcctgtccgtctccgcgtttcagcgtcacgctgaagtctttggtctccggtgcggcgcattgttccgcgcacatttgccacgtcatggtggtggtgaaggtcgtttccgcgggggcgtccttttccggagtcacgcggaaggccattttcgccttcccgctgtaaccgtaaaaatccacgagtcctttccccaattccggaatttgccagaaggggccttccacccggaagccgggaacggccttgaacacggcttccatgggcagccctaccgttcccggattcttgtagtagacgtgccagtggtccggcagagtcagctccgtcacgatgacgaagggtgtttctccgtaggacgtgactgtagccttggaggttccggatgcctggggcgttccaaaatctcccgcgccgccgaagttcatggctccgaagtcctgtgccgcccccgtacctgctcccccggcaaaaatacccagggaaacggcggcggctttcaaaaagtttctcataacaaaggcggttaccataaagaaaggggggattcaatgtttgtgtgttgcatggtgcggcgccttgtataaaatagggtcatggtaaaaactaaaacgacgtacgagggcggcctccactgctccatggttcatgaaccttccggggccaagctttccacggatgcccccgtggataacaacggaaagggcgagtccttctcccccacggacttggtaggcgcggcgctcgccggctgcatgagcacgatcatgggcattgtggccgaacgcaaaggaattaagctggaaggcatgacggtggaagtgggcaagcacatgaatgctgatccgcgccgcatcggcaagctggaagtggtcatcaccgtgcccctccccgccgatcatccggacaggaagctgctggaacaggccgccctgagctgccccgtcaagcacagcctgcatcccgatattgaagttcccatcacctggaactgggtgggttgacagccgcctgtgttttcttgaggccgcctgtgaaaacaggcggtttttttatgatattaaaaaatgttggaaaaatgtaataatacttgagtgaacttgacttatattgtcaggttgtgcatttttccgggcatgaagaaatttttccctgttttgtgtttggttcctgtaacagtgtgcggacttttgtgcggatgcggcggcggttcgggaaaatcaggggatgacgggagcgtttccctcagcggtcagcaggtaagcctctttgagggaggggacatgctgttcaggcttcagttcggcggacgggatgtggacgtcatcaagatggagacgagaatcgtgtatgatggggtttacacgtaccggttcaatgaaggcgcgaattccggggttttgaatattgtgccggcttccaacagccgcgccgcctgcgccatggcggacgtgaatatttcctttgacgatgctgaaaggagcacgggcgtgattgtctccggaaccgttacggaaaccggaccggacattgatttctccattgacggcgttccgcgccccatggccggctggacgtgccgcgtgcaccgggattgagtttccgcagatcagcagtccaggacgaggggaaagtgctggctgagcgggtaatccgtgacctggatcagctccacgccgtaaaggctggcaatggccggagcctcggacttgtcatacggctcgcagtaataaatggttttaacgccatgggcgcacagcgcctgcatgcatgaggtgcagggcatcgtggtgcatgccaccaccttcgcctcccccctgcggaacaggctgcacaggttgatttccgcatgcagcatgtatttctggcgttcgtcccggctggcccagaaggtgtcctgtgccttgaagccggggtacaggccgttgtaggcggtgccgatcacgcggttgtccgcatccagggcggcggctcccaccttgcggtaggggtcttccgagcgcagggcggccgcatgcgccagcgtcattacatactgcggaatgggaaggcgggatgatgagttactgttcatggttggaagactggagttccgccaggaagcctgactcgtccagatacaggttgggcggcagggaatagggggtggggagcgtagccccggcgatgacgttggagagggggggattcaggtaaaagcccgggagaaggcgtcctcgcgttctggcccgcatgccgagctgcacggtgccgtcatccagcttgaagacgctcctcttcatggacatggccagaatgatgccacggtccgtggcgaagcaggggcgccacccgatgttgggaagcaccaggtctccggagccgctgaaatcgtaaaacggcgtgcgcgtttccggaaccaggctgtacagcctgcggcgcaggaagtcggagcccgtcacctgcttgatgccctccggcatgctgtggtctccgtcgctgatgaggtacacgggggtgctggtgaggatgggccacaggacggaggccaccgtttcatgcacttcgtcatgccccacgctggtgagcagcagttcccggggctggagggagttcacgcgctccaattgctgggcgttcatccagaagtcgcacaggcggctctgggagcgggagctgtccagcagggtggccagccacttcctgagttccgggtggtccgcctccacggtgtcgttcatcaggcattcggctatttcatacccggtgagccgcgcgtttttggctaaaacgagcggcttgtgggcgatgcgctccaggtggttcaggatggtgtccctgccgatgctggcggcaatttccaggcaggtggaggagagctcccgcagggtgttgatgacgatgcgggggttgacggcatcaggcgcaatgggttctccgatggcggccgtgaagcggtaggggacatggaggggggccttggagaagaagcggttgccggagtaggagaagatgctcccccacagctcgtccatgtagatgggcacgatggggcagcgcgattttttcgccagcatttccagccccctgcgcgcggcgcacagggtgcccgtgcgggtgagctggccttccgggaagatgcagatcacttctccggccttgagggcctgaatggccttggacagggattcccggggattccgggaggaaatggggaggcagttgaagagttccagaatccagccgagccagcggatggctacgaattcctccgccacgatgaagcggatggggcgcggacagatgagggaaaggaacagcgcgtccccgtacgtgacgtggttggagacgatgatggctccgccgtcctccggaatgcggtcctggtggatgatgcgggagcggtagacgatcctcatgatccagagacccatcatgcggatgaattcgcggggaatgagacggaacgccacaatcgtgatgaccacgcccagggcggccagcacccagaattggttctggatggagaagatgttcctgagcatgagctggaagccgacggccaccaggcccatcaggcagtccatcaggttgcccgcggcgatgaccgtgctgcggttggagggatcgcagttgtcctggaggtgggcgttcagcggcaccaggtacgcggcggcgaaggctcccgtgataccgaagccgatgttgctgggcagcgagccgggagcgaagaaggacaggaagatgcagccgatggtgaagccgatcgcgcccagggggatgaggcccagttcaatttttttacggcaaatgatggaggctatgacgccgcccaccaccgtaccgccgctgagccacgccatgagaatggccgcggacatgctgaatccggtgccgtcaatggggtgctcctgggcgatctggagggagatgagcatcagggccccggccaggaaccagaagtaggagacgccgatttcgctgagcctcaggtcccgctggctccacaggtacttgagctgcacgaagtgctcgtaaaagagcttccactcgaatttccgggtctggttggccgggtaccggggaagggacagggccgcgatggctacgggaacggcgatgcaggtgaggatgagcgtggggaaggcggcggcttcccagccgtcgttggaggaaacttgcaggatgtcgaaccagacgaagatgccgatctgcgccgccagcatggacaggatgaggctcatttccatcagcccggaggcgtagccaagctggcgggagcccaccatgtccttcaccaccccttttttcgccgggctcaggatggtcgcctggacggagaagacgcagaaccagaagacggccatttcaatgttctcatacttgtagcacaggaacatggctcccagcaccaggatctggaggaaggacatgaactggatgatgcgcgccttgcagaagcagtccgccagccagccgacgaagggggagaacaggatgtagggcagtacgaagatgcaggccagaatgtactggagggagttgacccaggagtccggcccgtacacggcgctgttggcggccagccagacgcccaggggaatcagcaggaactgggcggctttttcattgaaggcgttctgggcttgaatgagaatcagggaataaaagcccctccattccttttttgagggcatttttttcttagatgtctgtacgtcatccatgtggggcggattgtagcagatcacagggggtagggaaggataatctgtttccgtaccggagcgctccggggaaggcgtgcaggaggctttttcccgatttttggaaaggaaaaggatgcggggacggtggaacggccatggccggacggaggtgaaagcgtgtattcccgcagtgaagcggaggacgcgccaccgggcctgaaaacccccgtggagcgccgcagccccgtacggctttgcacggatgaggggccggaagccggagaatccttgtcatgaagcggttcggcaaacaggctttatggttgacatgaaggtagggggccgtaggatgctggcagaaagctatcacccgaagagagatcatatgaatacttcccagacgataggcgtgctgctggccgcaggcgcaatccttctgccttcctgtgaaacggaacgcgtgaatgaacgccccatcggcatttatcctacggaaaatgtctatccgtccggctccggcgccatgggcgcccagggcagcagcctgttgaatgagattcagcgtgaaaattctctggatccggtagcgggtcagaattccggcttcaatccggatccggctcagaccaattccggcaccatcggcaacatggtggggggcaccaacaatatcacgcctccgccgcccgttgcgcccaagcctgtcgttcccaatcccgtgagtgactctgccaattccggcattgccgctcccaggcccgtggagccctccactgcctcctccattcccgtggcgtggcccacggcggaccccacggtggtggtcagcccgtatgaccgcaccaagaagatcaagattctgaaccggggcaccaacaagccctacccttccggtaccgtcctgcgggacaccaacttcccgaacgagatcaagaagttccgcgtgccctgatgcggccgccgcaaaaagatgatgcccgcgcccctgaacatgctgtatgttccggggtgctggtgtattctaccccctgtgaaaccatgagcgaagcttccagaaaacagctttccttttcctccgtagccattctcggccccggccttctgggcggttccctggcgcttgccgtcaggaagcagctgccgcatgtccacgtgcgcctgtggggcaggagggaggagccgctggaatatgcccgctcttccggagccgcccatgccgcctccacccggttggaagaggtggtggaaggcgcggacctggtcgtgctggctaccccggtgggcgtgatgtcccgcctcgtttccggaatgctccccctgctgaaaccgggcgtgctggtgacggacgtgggttccgtgaagggctgcgtccaccagtccgtgggttccgctctgacggaaaccggcgtggcgtttatcggctcccatcccatggccggttctgaaaagcagggcatggagcatgcctccggggagcttttccggaacgctacgtgcattctgaccaatgacgagcacgtgcatgaagacatgctgctgctgctccagcggttctgggagcgcgtgggctgccactgcatccgcatgaaagcggcggaccatgattcttccgtagcccgcatttcccatataccgcatgccttgtccgccctgtgcgtccacaccgccctggacgggggggatgtgaagctgctggggctggtgtccgccggcggttttcgcgacaccacccgcgtttccatgggggaaccgtccatgtgggcggaaatcctgacggagaatgcccccgccgtcctggaccggctggacgaagccctgtcccagttgggggaggtgcggaaccgtctggcctccggagacaaggaggcgctgcgggaatggctgaaggccgcggcggagagccgggcgcaggctcttggcctgtgagaggcgccgggggcgttctgctgccggatgtgcctttgcaggaagggaaaggaacggcctgttatcaaattgttaacaatccgggatggacggcccgatgttccgttttatacttgccccatgcgtttatccaacatgaataccccgcgccgccgccgccaggggcgcggtttgcaccgtgccgccgccattgggagcctgcttgtcctcgggcagtccgcctatgccgagactaaacccgccgccgcagaggagggcgtgcaggaaatgccggaacgcgtgatgaccatccgttccaagtccctgcgggcggaaacggtcagttccgccaccctcacgaacatgaagacggaagaagttccgcaaacggtaaacgttattacgcgggatctgatggattccaagggttccgattccctggtggaggccctgcgcatggattcctccgtcaatacggggggggacatgctgctgtcccgcacggcggaccagtacaccatccgcggttttgccggcaccgatgtgcagataggcaacatgcctcttccccgcggcatgggatacggcatggatacgtccctgatagaaaatattgaaattgtcaaaggccccatcgggtccatttccggcggccagaccagtacgctcggggcatacggcgccggcggttccattaacctgatcctgaaggcgcctgattttgaggaacggacggagttgacggcttacgcccgtctttcccatcatgggcagaagtaccgcgtaactattgacgacacccggtacaggggtgatgaaacggacggttttgccctgcgcacggtggtagccgccgagtatgaacgcccgttctggctgagcaacggagccaacggtggccagaagtacacggtttcccccattttccgctggcagcatgattcccgtaccaagacggtgctgacgaccagtttccagtaccagaattcgccgacgacgatgggcatccccgtgctgggcggccactttgtggggccgtatgacgcctggtacggttctccgagcggaaggctcaattccaaatccctgctggcgatgctggatttcgagcgcaagctggagaaggtctggacaatccgcatcggcggcggcatggggtacagcgatgtggactacaatgtctggggcatttcttcttccgccggacgcggaatgagcacggaggattattacaaccagatgattgcttccggaaaggccaaatacgaagccgcgtggagcgacgagtggaacatcaactggaatttctattccaacgcgctggcggagttcaagaccggacaggtggagcatgaagccctgatgggcgtttcctacacggggagcagcacctatggcgacggttccagcctggtgacgaacgctaccgcgaacacgaacggctatttctccctgtacaatcctccgccctttttccccgccgggcgcgactattccggagccaatgcgacggataccgtggttcagcgggcgggcgtcctgctgcaggatgtccttagctacggacagtggcgtttcctggccggcgtgcgcggggacgcgcatttcagcctggacaacaattacgcgtttgcgtggagccctcgtttcggaattacccgcatgttcggtgagcgcgtagctctgttcgccaatgcggcccgtacttccgcccccaatttcgggtatctggatgaaaacgggaaggaactgaccgattcctggcgtacggaccagatggaattcggcttccgggtcagcccggtggacaaggtgtggttctccgcttcctggtttgacatcatccagaataacactcccgtagccatagacggatataccaaccggtactattcggacggctccaagagggcggaaggcgtggaactttccctgaacggggaaatcaccaagaactggagttcctacctttcctacacctacacccgcaccaagaaccggacctccggggaagtgtatcccaccatcgctccgaatgcgctggccctctggcagaaataccgcattgacggcggcctgctgaacggcacggtgctgggcctgggctaccgctgcaaggattcctactatgccacgttccgcggtgcaaagattgcggataattataccataccttcctacagcgtgtttgacttcacggtggaaatccccctgccggaaaccaaatggctgaaggatgccaccctgaggctggccgtatacaacattttcgacaagaagtacgtgcagtccacccgccacgccgtgcagtgcacggtgggagagccccgcacgtttgaagtaggcgtgaagactaccttctaaccattccttccagccatgagttcccccgtcatttccgtcacccgcctcaagcgcagcttcaagtccggttccgaggacatagccgtgctgaaagacatcagccttaccgtgaaccagggagagttcgtcgccgtcatgggcgcgagcggctccggaaaaagcaccctgctgaacgtgctgggggggctgctgcctccggattccggcacggtgacggtggatgggctggacctcggctccatgtctgatgccgccctgacagtgtaccggcgcgaccgcgtggggttcatcttccagatgttcaacctggtgggaaccctgaacgtggaggaaaacatcctgctgccctccctggcggggggcaaaaaagtggcctcttccactctggacgccatgattgaaaaagtggggctgtcccaccgccggcacgccatgccggatacgctcagcggcggggaacagcagcgggtggcgattgcccgtgcgctggtttccggcccggcgctggtgctggcggatgaacccacgggcaatctggattctgaaaacacccggctcatgggggacctgttccgggatttgcaccgtacgcagggctgcgccttcgtgctggtgacgcatgcgccggacgtagccatgtgggcggaccgcgtgattgtgctcaaggacggccgcatcgtggacgacaggcccacggcggaatttgccgggcctgtggaattgtcctccttctatgaacgcacgctgaatgacgccttatgacgctgctgttcaaactgatttggcgggacctgcgcgccaaccccggccgggtggcggtcagcgtgttcgccatcctcgtctccgtcagcctcattgtctggatgatggggagctatgatacgctggtcaaggagttcgataacgacgcggaggcctacatgggcagctatgacctttgcctggtgccggaggcgcccaaagggccgcttccccccgggcagtacccgcggttcagtgatccggatctggccgcgcgcctggctgcctcccccctggtggaatccgtgaacgccgcctgccaggtgccccgcctccagatcggctgcgggaatgaacgcggcagctttgacgagcagacgcgcgaccgcatggggattcctccgcagagtcccatcctggtggggaaccatgccgtggaatgtccttatgatttgaaggaaggcgtctggccggatatggcttcctcctccgccatggagggggtgctgggcagcggaagcgccaagtatttcagcgcgggcgtgggaaccgtcatgaacgtgcgcgtgggaacgcacgtgtacgacgtgaaggtcgtgggcatcgtcaagcaggccaaagctactcccggcgtcattatgggaccgggcggcatgtccggaccggctttttcctccctctttgtgcccgtaaaggtgtgtgaaaaaatcacgggccagccttttgcccccaatttgatttacgttcagctcaaggaaggggtggacaaaaaggagtttgtggacggcctccggcaggagctggcccaggcctccgccgtggtggcggatacggattccattatccagcggctttccagcgaccgttccgtccgttcccagaaggagagtgcggagatgtccgtctggctcgtcctgttctcctgcgtcttcatcattttcacgaccctgagcatcggcgtcagcgagcgcacccgcagactggccctgatgcgtgcgctggggatgagccgcatgcagatcgcgctgctgattgtgggagaggggcttttcctgtgcattccggcgctgctgggcggcctggccgccggattttgcctggtgtaccttctggaggaaggttcttcctcggtccccgtcctgacctggacgacggtgctggctgccgccgcgtgcgccgtggggggggccttgctggcttccatcattcccgcatggcgcgcttcccgccagtctccgctggaagcggccgtgccctcttccggattcatcgggaaagtgagccgcgttcccgtgtggtccgtgatcgccgggctggcgtgcgtgtgcctccagcctgcggccctgcttctgccgggcctggaggtggagacgcgcaagtggatctttttctggctggggtatcccggcctggtggccggtgcgctgttcctggctcccgccttcgtgcgcgtgacggagtgggccggatcatggatcacggggctgctgctgcgcgtgccgcattctttcctgaaagtgcagctcagccgcaacctcagccgttccgtgggaaccgccgtatccatgtccgtgggcctgtccctctttgtaggggtgcagacgtggggatattccatgctggttcctttctctccggatacgtccacgcccggaacgctggtttccttcctgcatacggagttcaagcctgcggacgttccggagctgatggcgcggcccagcctgcgtaattcgcggatgtatcccatttacgtggatgaaccggacattgccccggcgcagatgaagaccccaggtttttccggaatgcgcaaccgctccatcgtgctggccggcattcccgtggcggagatggctcagggaagccatcccctgttcaggcccgtgttcgtttccggcaacccgcaggaagcctatgccatgctggaatccacccgttccctgctgattccggacacctttgcccggacggtggggctgaaggccggggatgacctgatgctggtgaatccgtcccatcaggggcgccgttccgggaatgctccgtctgccggagctcacggacggggcagaggccccggcatgcagggggaaccctggaaggtggcgggagtcgtctccttccccggctggcactggctgaccaagaccagcggcatgcgcgtgcgccgcgggggctttgtggcggccctggcgattgccgatgaacgctggctcaaggaggaatacggccatcaggggttccagtttatctggggggacaccgcccccggggtaagcaacctggagctccagaacgacctgggggaatacgccctgatgaaggtgcggcagcaggagaacgaaggggaaggcgtgaagccgctggtgaaggccctgacccgggaaagcctgggggggagcgtcaccagccgcggtgacgacgtgatctttacgatgagcaagcttcccatcatcatgatggtgattgccgtgctggccgtgctcaatactgttctggcctccgtgcagtcccgccgccgggaattcggcctgatgcgggcggtaggcgtgccggccgccatggtgatgcggatgctctgggcggagacgctgatggtctccctgtgcgccgtcgtcatgagcctggccctgggcgtgctgggagcctggtgctccatccagattctggaatacggctatcacttcggcatcgtcactcctcccatcacgatgccctgggcccatctggggtatgcggtgcttctggtgctggccctttcctccctggcgtgccttctgcctgcgtggcgcatgaagcgcgcgtccgtgacggacttgctttccgtccgggaggggtagggggccttctggattatatttgtcggaaaaagtattgattgctgaaaattaagcaaataggatcagctgtatactttagaatgaaatatttttaccatgaccggaatggagaactgcatggtcctgctgaactggattttctggcctgtgaggtaaaatggggcggtctgcctgatcatttgatgatccgtccagtggatggtgaagaatggattgccctggcggaggcagtgaaaagggaaacgggaaccggattttatccgaacgtgatgtctgttccgccggaagaggtagccggtctgtcgttttggaagcgtctccggtattattaccggagatcatggagaatggcattcgtcttttccggacgcgcttcccggcgggaatgcctgtccgttttcctgtccatgacactggcggattgcctggggctggcggttgcccaaattctgctggggcttgctcttcctcccctgatgccgggaatcgacgtgttttcctgtttgttcttcatcttcttgctcttgaaattgttgctggggttgctgattgtccttcaattctttgccttgtgttggagaaggcttcatgacttgtccctggcgggcggttggtcgtttgttcttccttttgtccttctggctggcagtttgccggtagaatggttgtttggtcgtttgttccagtctgatgcgtggggaatgttcatggcacatgcaggaaaggccggagtaatggcggcaggaggaatgggagtggccgttttcgtgttgtccggaacctgggttgttgcgctgttgggcctgtttcccggtgcgaagaaggagaatcaatacggtcatcccccggaggtatgaccgttccgtttcccggacagagaggaaccggggatttttcccttcgccggaaagggaggataatatcgacaaaccccgtaatgcgtgtttgactgaaagggctttcccgtgaacctgtcttcttccagtcctggtcctttttctgaaaggaagttcagcttgcctgaatggatggcggcaagatggaggtggttgttttcttggtccggccgcatttccagcgcctcatatttatacgcgtggctgttttatggcgcgtgcatggggacgctggttttttcaggatattgggccgcggtgaatgggagtattcatccgcgttttatggtaacggctgagcatggaataaacctggcgtgtttgagtgcggccatgcttgttccatgcatgggacttgtttttcgcaggctccgtgatcttgatctgggcctcctctgggcggttcccgtttacgcggcttccttgggatgtgcggagacgggcttttatcatgtgtacggatgggcgcgggctgcggcgggagggaatgcctcccttttaatttgcggcgccatgtttttctgcatgtttctgttttgtgccgtggcgccgcttgcgctgggatgtgttcccggcaacagccggtccggcatttccgggcgaaccggggaaagaacggaaggaaagaagtgattgtgaaacgttattattaccatacgccggatggggaattgcatggtccggccgattttgatttcctggtcagggaaatccgctatgccggattaccgctgggactgatggtcagggaggagcgttcggaagactggatatggataggagacattccgggagctccgccggaatggaagttgctcaaggagcggtattccggaaccggggagtggatgaaagtcggcaaggtatggaaatgcggcagcagaagtcgttttaagtggctgttttccttgttgttggtgcatggccgttcttcgcgttgggaggcggcgattgcctatggcgtgcttctggcgcttgcccctcctttctggatagtatgtttttgtggagctgccggtttttttgaatctcttccttttgggatgctttttgctcttctgccggggttgttgctgttgtttttctttttattttgttttattgctctgggcgtgagacgctttcatgatgccggactgcatggtggctggctggcggtagtctggttgccgtggatagcgggcctggtttgtccttttaaggggacgcttttggcaatgtccttttgctggaaccccgtgtggggtatgttcactggcatagctgtcttgactgctcccgtcctgttcagtcttttgctgccggagcaaaagcgcaaaaacatctatggagagccttcctggaatagaaaataagtgcatgaaaaagaaaatagaaatcgcttcctggccgcgaaggtcccattacgagtatttccagacgtttgaatgtcccatgttttccatcacgtctcccgtgcgggtagatgccttgtaccgttatgcgaaacaggaggggatttcctttttcgccctgtgcctgtttgtgctgttgaaggcggtgaataagattccccaactgcgccagagggtggaggaaggggaggtgtgggagtatgaatccgtggacgccctggttccggtgctggctaaggatggggaattcacccagattttagtagagtaccgggcggagctggctgattttctggagcatgccgttccgctcattcaggcggccaagcaggctccggcccgggcgaatccctgccatcggacggatattgccgtgttcagctgcctgccgtggattccgtttacgcaggtggccagcgcctacagggtgttccgggggcagtaccttcccctcatccattgggggaagatggaggcggacgtttccggcaggctgatgatgcccgtggccattcaggcgaaccatgtgctggtggacggggtccatgttggtaatttttataaaaatattgattgtttttgttgcgggttttaggctgggacgcatggcttccctattgcgcccttccagcgattaccggtctctgctttcctacagaaaggcggagcagatttatgatctgacctattatttttgtaaggcgtacttgtcttctcgtgacaggacagttgattagatggttcaggctgcccgttccggaaagcagaatattgcggagggaaaggaggcggggctggtctccatggaaacggaaatcaagctgatgaatgtagccagagccagtctggatgaattactggctgattatgaagactttttgagagtgagaggctttcccgtgtgggaaaaggattcacgagagtccctttttgtcagaaagaagggtgcggataaatgtctggcccgggattattttttggaactggcccggacaaggccgccggaggtggtggccaatatggccatttgcctgattttccaggccaagtatttattaatgcggcagctcaggtttttggaggggaagtttcttagagaaggggggatgagggaaagaatgagccggatgagaaggaataggggtgataggggtgataggggtgataggggtgataggggtgataggggtgataggggtgataggggtgataggggtgataggggtgataggggtgataggggtgataggggtgataggggtgataggggtgataggggtgataggggtgataggggtgataggggtgatgatgggaattccctataattcctaaagtttcctgtgagccccataggccctattcttctcccaaggttttactgattcccggccaggcatcccggacagttctggactgagtgccccggagatatttccaccagctccggctcccggtccgtcaggcagagttccgggtttccgagggtgtttctggggcggaagctgcatccgcaaggttcctgcatcatgttggggggcagtccgggaatggtgtagaggggagagcctttcgcatggagtccgggaatggatttcatcagggccctggtgtaggcgtgccggggatgttccaaaagctcccgcgccggggcgctttcaacaatgcggcctgcgtacatgacgttgatgcggtccgcatattggcgcaccacgccgaggtcatgcgtgatgaggatgacggaggtgcccatgtcctgctgaagttttctgatgaggtcaagcacctgcttctgcacggtgacgtcaagggcagtagtgggctcgtccgcaatgaggatttccggcctggtgatgagggccatggcgatcatgacgcgctggcgcatgcctccggagaattgatggggataggcgtccatgcgctgttccgcgtccggtatgcctaccagggcaagctgttccagcgcgcggtcgcgcgcctcttttttgccggctccctcatgaatgacgaggggttccgccacctgctccccgatggtcaggtacgggttgagggaggtcatgggatcctggaagatcatggagatgcgcttgccgcggatggaacggagttccttttccggacaatgaagcaggtccatgccgtccagcatggcggaaccgctttcaatgcggcccggaggcattgggatgagccccatcatggagtagcaggtgacggattttccggatccggattcccccacgatgccgagcgtttcccccggcgccacgtcaaaggacacgtttctcaccgcccggacgatgccggccctggtgtggaaggaggcgctgaggttcctgacggagagcatgcggagaaggcgggattgtcagtcattgcgcacgcgcgagcgggcggagaagatgaccgggatgccgggagcggggtaggcttccctgattttgttgcgcaggtactgggagtagctgtccgtgagcaggttcttgtcattgacgaagaggacgtagcgcgggacgggaatggtgttgtacttggggtccaccgccgtggtgacgtagtagattttcagtcttctggtggagccgctggcggtgccgggagggttcatctgctgggcaagctggatgaggcggttgagctgtccggtggtgggcaggttacgggattcccggcggatgcgcgtgatgaccttgaagatgatttccacgccctccgctttttttgcggaggtggcgatgaagggcgcatagttgatgaagaagagttccctgcgcacctgttcctccacttccgccatgcggtccttgcgcggggcattcgggtggaagaggtcgaatttgttcacgatgatgatgcagggtttcccttcctccgcaatgatgccggcgatacggcggtcctgctgcgtgatgcctgccgcaatgtcaatgaccagcaggcagatgtccgcccggcggatggctttttcactgcgcatggcggagaagacttccacggaggtgtcccgccgggagcgcgggcgcatgccggcggtgtcgatcagcacgtagggctggccgtcgtgcaggtaggggacgtcaatggcgtcgcgggtggtgcccgccacgtcggaaacgatggtgcgcttgtcccggaggatggcgttgaccagggaggatttgcccgcgttggggcgtccaacgacggccaccttgatggggggggcggcgtcctccccgtcttccggttcttcctccagttcttctttcagcggggcgccctcctgtttgaggaagtcgtccagccgggaggcgagttcggagaagcccctgccgtgggcggcggagagaaagatatggtcgtcaaagcccagtccggcgaattctcccaggttcagatcctgcttttcatggtccgccttgttgagcaggaggatgacgggaacgtccgacttgcggaggtggtccgcaatgctctggtcaatgggggtgaggtggtcccggcagtccagcacgaagaggatgaggtccgccgttttcatggctatgtccgcctctgccgccacctgttccgcaaagccgtcggtcaggcgcgcgccgatgccgcccgtatccatgattttacaggcgcggtccgtaatcttgcagggggcggagagccggtcgcgagtgacgccgggttcatcatgcacgatggcgatgcgccttccggccattctgttgaagatggcggatttcccgacattgggcctgcctacgatggcgatggtggggacgtgctgcatgcgcgccatgttacccgaagggccggaactgtgaaagctaattccgcgccaacggcgggcgcttccgccgggggcttatcccttgtgcctggcctgattgtgaaggtacagcgccacggcgatcgtgatgacgttgggaagccatagcaggatgtaggggagcatcgtgtcgcttttccgggacaggtccgcaaagatcagggccacaaagtagagggaggcgatcaggatgcccagggcaaatcccgtggaggtgtcttttctgcgggtgttgatggccaggggcacgccaatgagggcaaagacgatgcaggccagggagaaggaggcgcgcctgggcagttccgtggcgaattccgtggtctgttttttatccagatagccgggcgtgttcagggcttccctgatttcccggttggtgaagcggttggccttgatgcgccgggagcgggatttgtccaggttgatgctcaggggcatttcatccatggtcacgctttgggagatggagtccttttcctgcgtggtgatgagcggattgatgaggtgcaggtaaagggtttttttctcgggagagaagtccatggtcacgcgttccgagtgcatggccacggcgggggatttgtcgtccgccttctgatagatgtgcatgccgtggatgacgtcgtccacgcgcttgtcaatgtagatttccagattatcgaatttggtgatggcctgtccttcattgagaagccccttcgggttgatggaggcggccttgatgagcagttcggaaatggattgcttggcgcggggcgcgatgtctatgttgatccagtagcagaggccggagagggcgatgccgatggcgatggcgggggcgctcagacgccacaggctcatgccggacatgcgcatggaggtgagttcgttgtccgaggccaggcgtccgtataccagcagcacggccgtcaggaatccccatggaatggagaacatcagcgagaagggtattacctggaagatgaattccagaacgatgctgatgggcgccttgttttccaccagaagggggcgcagttccttgaacaggttgcccaggagcagcagggcgctcagggccatcacccccagggccgtaacacccagcagctggcgggcaatgtatctgtcaaagatcttcatgcagtaaaaccgtgccggagattttgcccgaaggccgcggacaagtcaatcacgcgcacggaacaatccgtatccttccccggagggaaggaggagttggatgggaggatgaaagtccgtgcggctggtgaaaaaggatgcggcatgttgttcagttttctttttgttccaggcggccgagcagtttttcccgctgcgggggaagcttgccgaagtgggatttcagaatgacgtgcgccggaatgccgggatgcgcgatgccgtgcagccgcgcgagttcctgttcaaagtgcaggacggcgcggagggtggggtcgttgttttccagataggcgtatgcccgttgcaggaggtcgtagaattccgggatgggcgtgtccggctccagcatttggagaaacaggcgcgcgaagtagcctgctgcgctgagccggaggtagcttttccggaggggcaggcggggggagagcaggtctgcggaagtcagggagtgcaggtctcccgtttttgcctgcgtccactgcatgcggcactggtagaagaggtccaggcgcccggcaaaggggctgttgggctttctggcgcttttggccgccgttctgatgatgccttcctccgtgcaccagacgacaatcaggccgttctctccgaggggatagagcttcaggaccgtcgcttccgcattcatcagaggcgtttttccagccctgttttagccggttgttccgttgggacggtctgcccatagggggagggcaggatgccggcttccgtcatggcgtccgtaaaggcctggatggcgctggtgcctccgtggatgcggatggcggaaaggagctgttcctgggcggcgtccttgtctcctcccatgaatttgatgatggcctgggtgcagtagtagtacggcgtgtcgtccatcgggccgtacaggttttccagttccttggccaggggccggttgtccagcttgcgggcgcaaatatagcgcttgaattgcagcaggggagtcatgccgggattgtccttgaagggaggcagaagctccgtgaaggctttcagcgccctggcatagtcatgattgacgtagtgcgcttccgccaggttgaactgaatggtgaggttggagggatccagcttctgggccttttcaaagttttccagggccttttcaatgttgcggatttcaatgtagcatgcgccgcggagattgtataagcccgggtttcctgcataaagcttttccagctccgtcagggagaaaaggcattccatggttctcttctgcgcaaagagctgttccgccttgcggaattggtcaatgtagctttttctggttgcttccggcaggctgttgaattcctgaatccacgccggggacggaggttccggcggtgtttgctgcgcggaggcggggagaagggcaagcgtcagggctgccagtaggaaggtgcatgctttcatggatgggtcaggaattcaggtggggaatgattttttgtagcgcggcttccgccgtgagtccatatttttttctgaggatgggttccgaaccgtgttcgatgaactggtccggccatgcgatggcttccacgggcgtggtgacgcctccggcttccagggattcaagcacggcggagttgaagccgccgctgatggaatggtcttcaaaggtgcagaccacccggctggaggccgcatgccggcggatgcattcgtcatccaaaggcttgatgaagcgggcgttgatgagggtgaccgtgtggccctgcgcttccagcagcgctgccgtctcccgggcgatgccgatcatggtgcccagggaaacgagggtcacgtccttccccgtctggagcacttccgccttgccgatggggaggatttccggcgtggagggaagggggaccccggcgccgcagccccggggatagcggatgacggtggggccgttctggtaatggttcatggtccggagcatgtggacgaattccgcttcatccttgggttgcatgaagacgatgttcgggatgctgcggatcatggcgatgtcaaacaggccgtgatgcgtggggccgtcgtccggggagagcccggcgcggtccatgcagaagcgcacgggcagcttttggagcgcggcgtcatgctggatcatgtcaatgcagcgctgcatgaaggtggagtaaatggcgatgtagggcttcatgccttccgccgccagcccgcacgcaaagagggctccgtgttcttccgcaatgcctacgtcaaagtagcgcttggggaaggcttccttgaacaggtccagcttggtgccgctggccatggcggccgtgatggccgtgacggattcgtcttcgtgcgccatttccaccagcgtggaaccgaagatgtgggagaaggtgggggtggcggttgcctgcgtttcgccgtcccgcacgcagtaggagcccaggccgtggaatttggtggggttgtccagtgcgggctggtagcctttccccttctgggtgaccacgtgcaggataacgggttcgttgaggtccttgatgtaggaaagggtgcggatgagggtggggatgtcgtgcccgtccagggggccgaagtagcgcaagccgaatttattgaagagcagggaggggaagatgaggttcttggtggtgccttccagcttgaaggcgaagtccctggcctgcgtgcctcccagcttttcaatgaaggaggctgtcttgtccctcagccaggagaaggtttccgaggtttgcagggagttgaagtattttgccagcgcgcccacgtttttatcaatggcccattcattgtcgttcagaatggtgatgtagcgcttggtggtctggctgatgttgttcagcgcctccagggtggtgccgcaggtgaatgccgcatccccggctacggccactacatggtagtcctcccctttcagatccctagccgcgcacatgcccagggcggcggaaagcgccgtgcccgcgtggcctgcaccgtaggcgtcatggggggattccgacattttggcaaagccggagagcccttcatgctggcggatggtgtgaatcagcggggcgcgccccgtgagcattttatggacgtaggcctggtgggaaacgtcaaagatgattttgtcccgcggtgtttcaaagacgcggtgaagggcaatgctcagttccaccacgcccaggttggggcccagatggccgccggtgagggaaagggagtggatgagggtgttccggatttcttccgcgagccggggcagttccgattcagggattttcatcaggtctgcatggctgcggatgcttgccagcagctccggaagttcaggtaagggagaattcattgctgtctggttcatcgggatccgttccatcctggacggtctccgggttgctgagggtttggatgcgcagttccgcatcatgaaggatgccgcggcagtggcggatgagcttgttgccttcttccaccagggctatcatgtcttccagttcggtgacgggggcttccgtcaagcgtatgatttcttccaggcgggctacggattcttcaaatccgggagcgtttttccgttgtttggccatatggggaattaaggttgaggggtggaagcggtttcctgaaggtctttgtaaagaatcatgtccgctccctggatgaattggcgggagtccggcgtcccaaagcgttgcgacaaggggtagagcgcacggctgtggtcaaagaggtatacgggattcctgtccttcgtctgaagcaggacggtgccttccagaacgaggggggtgaattccccgtaggaggcggcaatggtgcggaggtccgcattgagcgtggatgagggagtcaccaggatgctgcccaccttcccgccgtggaatttcagaatgcgttccagcaccatgaattgctccaccattttggggaggccgatggctttcctgtctgcgtaccagccgacggcggacggctggtccgtgaggatgaaatccttttccgacgtctgggcgcgaaggtcccggttgaggcccggggggaaataagggggccatgccggaatgccgcggctggccgtcaggatgcccacccgcaccatctggggaaggctgagcagaagggggagggaagtgatgagcagggcgagcagcaggacgccgccccgcaggacggggactacctccttgttggagtgccgtgcgatcaggttgaggacgaaggccgtgccgtaggccgtgaagaagggggcgaagaggatttgaatctgtcccagggaaataccggatttgttggaggtgtaaagggccatgccgatgacggcgggcacccacatggcgaagacgccccatttggcctggttgacttccggccttctgaatttgtgcaggagggccagcaggaacaccatggccaggggaaggttcccgaggttttcataaaggaggtcgccctgcgtcaggatgttgttgacgatggaggtgacggctttctgggcggcgatgggaatgtccccggcggccagggagttcatcgcgatttcttcattgccggtcagccccgtgaagatggtgtaataggccgttccgaagaagcctccgctgagggagcggttgatgtaaatggggtaggccaggaggaggaacaggatcacaagtcccggaatgcagtacaggccgtgaggcttgaagcggatgcccacgaaaatcagaaagccggccatgggccacaggccgatccagccggtgaggcagacgcatgaaaaacagatggagctgtaaatgagcggcatcaggaatttacgcttctcctccctgttttgcagggccgtgtacaggaaatggatgccccaggcaaagaagaagagcatcatcatctgcgggaggccgctggtggcgtattgcaggaagaggttgctgagaatcatcgtcaggcaggtgaagctggcgatggtgacgtcaaacatttggtggaggatgtaatagcagctcaggacagccaggatgaagaacatgcaggaaatgcccgccacgatgcggtccggcaggtagatcatggagctgcccgtcatgctccagaggtcaaacttgtggacgccggccaccttgaagacggcggcttccaccaggatgttcagaggggcgttgcgtgtgtcccggagggcgtagggattgaatttttccggattgacgagggattccccctgtcccgccagaatggtttcctgttcgcggatctgggcgtcggaaagaaaggggttgaggccggcgcgggtgctcccggagaccatctggatgggtctcagccagttggtggccatcccctgtcccctggccacgttccgggcgatctgggcctggtccatggcggcgctggcgttcaggccgttaaaattgaaaaagtactgcacacccgtaatcgccagcagcaggatgaggatgatgataaacggtgtgcgggatgccgtggtgggcgcattcatgaaggttgaatatcttgtaatttgcgttgaagggtgcggcggctgatgcccagaaggtgggctgccgccgttctgttgccgtttgaccgggccagcgcttgttggatggcattccgctccagcaaggataaattcaaaacccctgccgggacaagcccattctgtgtgctgggggcattgtcctccaactgttcctgcgccatgctccccggggcggccggctgctgctgcgcgtgcagccggggtgggaggtgggagagttctatgctggcggagttgctcatgacgacgccgtgctccatggctgtgcgcagctcccgcacgtttccgggccaggagtagttccgtacggcgtcaagggcgtcccgggaaaggggtttgaattccttgttattctccctggcgaattctttcaggaaggcggtggcgagcaggggcacgtcctcccgccggtcccggagggggggcatctggatgtggaccacgttgagacggaaatagaggtcttcccggaatttgccctcctggacgagtttcttcagtgatttgttggtggcggcaataatgcgcacattcaccgggatgggcgtgttggagcctacgcgttcaatggtccgttcggacagcaccctcagcaggcggacctgcgttccggcgtctatttccccgatttcatccaggaagatggtgccgccgtccgcctgttcaaagcggccgatgcggcgctgcccggctccggtgaaggagcctttttcatggccgaatagctcgctttccaataactggggggaaagggccgcgcagttgacggccacgaatttattctccggcctgccggaaagggaatggatggcctgggccaccagttccttcccggttccgctttccccttcaatcagcaccgtcgtcttgctgggcgccacctggcggatgatggagaacacgtgctccatggcggcggaccgtccgagcagtttttgcaggccggagtccgcctggatgcgggtggtgagctcctggttggccgtctccaggttccgggtatggagcgcccttttgagcaccagctccacggcatccaggttcaggggctttgtgacgaagtcgtacgcgccctgtttcatggcttccacggcggcgtccacggagccgtaggcggtcatcatgatactctgggggggatggggcagggaagccgcggctttcagcacgtccatgccgctttccccgcccagccgcaggtccgtcaggaccaggtccggggattcctcccgcaggagggtgacggcctgggaaagattggcggcggtgtacacttcgtaatcgtcctgaaagcccatgcgcagggcgtcgcgcgtgggtttttcatcatctacgatcagcagaacgggcatcttcatgacgggatggaggagggcaggagcctgatggtgcgttccacgcgcggcaggaagaccgtgatggtggttccctgccccggctggctggccagggtgatggagccgccgtgttccttcacgatgcggcgcacgatgagcaggcccaggccggagccggtggacttggtagtcaggaaaggttcgtaaatgctgcccatgacttccggggaaattccgcagccggtatccgccacggtgacgaacacgctgtcatccgtataaccgcttttaaccagaatggtgcctccctccggcgggatggactggtaggcgtttttgatcaggttgtagaagacctgcttgatctggacggggtccaggctgaggatggggaggctgggctggaggtccgtgttgatctggatgccgcgctggcggatttccggctccagcagtttcaggacctccatgatgatggtttcaatgttgtggggttcccggatgggcttggtggggcggatggcctggaggaattgtttcagaatgacgtccagccgcgtggtttcgctctctgccgttttcagcagttcttccatgtccgtccggtactccgcgggcagttgttttgccttccgggccaggagctggagatgaaggccgatggagttgagggggttgcctatttcatgggccacccccgcggccagcagcgtgagggcgttcaggcgttccgcctcgatgttctccgcgtttttcttctgccggggcgtttcatcccgtatcaggatcagatggccctggttcctgccgccgatgggggagatgaaaatgttcaggaatttgtgctccggataaaaaatctccacgtcccgggaaacggcggtccggctctgctggatggtgtcccaggtgcagtccctgcccaggaagatgcagaagtcttccggcgtgatctggccgcgttccttgtcaaggagcttgagggcggcctggttgacaaacaggatttttcctttgctgtccaacaggatcaggccttcctggatggcttcaaacacctgctggaaaaaaccctgctgttccgccagctttacaaagaaacgctggaggtcctcttccttgatatggtcaatgcggccgatcagcttatcgatggtgtctttcttcatggcggcgtttccgtccgggctcgcccctatatataaagagagggatgtcacaaatcaagctgatgtgacatattgtcacgcatttgcggctggacatgcttccgggaaaggaggcaggatgaaggcatgcctgaagaacttccctgcatcccctttgtcagaacgcgccaggtagcctttcacgatacggacgcctccggcgtggctcatttcacccggctgctttgcctggtagaggaggtggagcacgagtacctgcgttcccgggggctggaggttctttcccccgattgcggctggccccgcgtgcatgtggaggtggattacgccagttccgccggtctgggcgactggttgagcattgaattgagcctgggagcggtgggaaccagttcgctggaatggaagtttgcggtgttccattcggagcatccggtcatgagtggaaggtatgtagttgtccgcgtggggaagggggggaaaccgcaggctatttcagagtcggagaaggaatgcctgatttcaggcttttcaaaaggaggggatgcctgtaaataaggcccatgtcttctaaaaagcctgtcgttcttgtcattcgcgacggctggggccgcaatccgttggggcctgatgtcgcgaaagagtacggtgacgccactgttctggctgataccccctttactgattacctcctggccaactatccccacagcctgctgggcgcttccggggaggacgtgggccttccggacgggcagatgggcaactccgaagtggggcacctgaacctgggcgctggccgcgtggttttccaggatctttgccgggtggacaacgccatcaaggacggttccatgggtgaaaatgccgtgctgaagaccgctttttcccaggccgccggctcccgcctgcacctgctcggcctggtgagcgacggcggcgtgcacagccatatcaaccatttggtaggcatcgtcaaatacgcctatgaagcgggcgtgcgcgacatctgcatccatgccatcacggacggccgtgactgttcccccaccagcggggccggattcatgcgccaactggaagaagccatcaagccttacggcgcgaaaatcgccacggttattggccgcttctatgcgatggaccgcgacaagcgctgggaccgcaacaagctggcatgggacgccatcgtgctgggccgcggcgaacagtgcacctgttccccttccgaatatgtggaacagtgctacgccaagggcgagacggatgaattcctgaagcccggcatttttgcctacggcaacgaacagcgcgtgcgcgataatgacgtggtgtttttcttcaacttccgtgcggaccgcgcccgccagatgagcgatgccttcctgtatcccgggtttgacggctttgaccgtgaagtgacgcccagggttcattatgtgacgctgacggagtacgatgccaagtatccctcccccatcgtttttgaacaggagcagctggacaacattttcggacagattgtgtcggaagccgggaagactcagctccgcattgcggaaacggaaaaatacgcccacgtcactttcttctttaacggaggcgtggaaacgcagttccccggcgaggaccgcattctggttccctccccccgtgaagtggccacttatgacctcaagccccagatgagcgcggaggaagtggcggacaagtttgtggacgccgtggacaagtacgacgtggtgatcatgaattttgccaacggggacatggtgggccataccggatttgtggaagccggagtcgccgcctgcgaagcggtggacagcgccctggaaaagtgcgtgaagaaggtgctggccctgggcggcaagctgctcatcaccgcggaccatggcaatgccgaacacatgcgcaatgaggacggctccccgaacacggcccataccaccaatcttgtggacctcatttacgtggcggacgacaaggaccaggtcaacctctccaacggcattctggcggacgtggcccccaccctgctgaacctgatggggctgaaacagcctgccgaaatgtccgggcattccctggtgacgccgaaaaaataacggttcccgcagttgatctttggaatccgtttccggcttgcgtggctggaaacggatttttttgtctccgtgttgccctgacggaaaaacgccggaaaaggatgcggataagcaatccgttatagactggagacggggaagcattcccctgtccacggggagcggagcagtcctttgtggaactggaatgcaaacggacgtaccggctttagggaagagggttcgctaacgttccctttcaaattgagatgccggagaggcttgcgccgcatcccgtccgggcacgcagttccgaaggttttccctttccatgcaaacggcttccgataggcaagggggagtcatcgcaagtttttctcccttggaaacaccgcttgaccacggattgcttatccgttggcttccggatatgctgcctgtcaggaattatggattggatctgctgagaattttgttgtgcctgacggttgtctttttccattacagcgggggatagaattgcggagggagcgtggctatggatggcttttttgtcttgagcggttttctggccgttcgatccgccggaggtttcacacaaggaagcatcggggaatattgccggaaaaaggctggcgcctgttgacggtgctgttgattgcctgggctgccggttttgctgttcttcttattgaaggccagcaggcgacggcgtgggccggagtcaggctgctgatagccgcgccaacacttgcgatgtggaagatgatggggaatgcggcggtctggttcatcgtctgcatcatggcctttctggcactgtttccgtggctttaccgttattacgggaaaaggccgttcctgtggcttctggcggcaagcgttctttttgctgcgttccggagcggcaccgtgatggactacggcaggctgtattatcaggtgagtttccgcctgtggcagtttttgctggggatgtggtgtgcgtcctggaatatggaacggtggaagagtccagggcggtggttttggattggagcaggcgcggcgtggctgctggcttcttccgccgccgcccatgaaggaaccggagccctgaactattcattcccggggtacgttgtttcttccgtcatctttgccctgtgcattgcctccctgtggagcgtccgcctgccgtccctgcctgccccctcctgaaatgggtggggattggcgcgggaatggcttacgccctttttctgttccacatgccagtgatgcggggcatggccgaagtattccgcatgctgcgggaacatgcgggaatgaagtggcaggtggatgggcccccagttttattctggggaattgccttgtgtgtttccctggttatcgcctatttcgtctatcagcatgtggaggtccgctgggtggggaagaagctgaaaaaggcaccggcaacccggaatgaagcttgggaaagagcaggggaaaatggcacggatgaaatatttaggaaaagatgaataaaagacttgtcatgatataaaatcacgttatattggccgtccccaaacgcgccgaaaggcgcaagaaatacgttttctatcgggtttgcctccggaaaaaaggcgcgcttcctgcttactgaaagggatgttcgccttgaatatcggaccagaccgacgaaccacaaccaaagcaggaaaacatgccgaccattaatcagctcgtccgcaagggacgtattactccggaagagaagtccaagtcacgcgctcttcatagctgcccgcaacgccgcggtgtttgtctccaggtaatgacccgtacgcccaagaagccgaactcggctcttcgtaaagtggctaaagtccgtcttaccaatggtgaagaagtgatcgcctacatcggcggtgaaggtcacaacctccaggaacactctatcgtgctcgttcgcggcggtcgtgtgaaggacttgccgggtgttcgctaccatatcgtccgcggggctcttgactgcctcggtgttgacaagcgccgccagggccgctccaagtatggcgccaagcgcccgaaggttgccgccaagtaaacattaacatcttacctactatatattatggcccgccgtaaacgcgtctatagaaaaatcgaacgtcgtgacccccgttacgacagcgctcttgttggcaaactgatcagcaaggttatgctggatggcaagcgctcccttgcggaacgcattgtttatgccgccatcgacatggctaacgaaggcacggacagcattgatcccctggaagtgatcacccgcgccattgaaaatgccaagccccgtgtggaagtgaagagccgccgcgtaggtggcgccacctaccaggtgcctctggaagtggacccggcccgttccgaatccctggccatgcgctggattgtgaactacgcccgcaaccgcaagggcgtgccgatgcacaaggctcttgccaatgaaatcaaggaagccgccaacaaccagggttcctccgtccgcaagcgcgacgacgttcacaagatggcccaggccaaccgcgcctttgcccacttccgctggtaatcccttcagcgactgtcagccgaaccattcactttcgatcattacagatactttccagacactatgtccgatcacgtaaacaatcccaatcgcaaggctccccttgagcgctaccgcaacatcggtatctccgctcacattgacgccggcaaaactactttgtccgagcgtattcttttctacaccggcatgatccacaagatcggtgaaacccacgacggttccaccactaccgactggatggagcaggaacgcgaacgcggtatcaccattacctccgctgccgttaccaccaactggaagcaggtgaaaaatgaaggtatcagcaaaatgttcgaaggcgaaaacttccagctgaacattattgacacccccgggcacgttgacttcaccgctgaagtggaacgttccctccgcgtgcttgacggcgccatcgtggtattctgcggtgtggccggcgtgcagccccagacggaaaccgtatggcgccaggccaccaagtacagcgttccccgcatgtgcttcgtgaacaagatggaccgtaccggcgccaacttcaacaacgtgctggacgacatccacaacaagctgggtgcgaacgccgccgccattctgatccccatcggcgctgaagaccagctccgcggccagattgacgtggtgaaccagaaggctgtcatgtatgccgacaacgaccgtctgggctccacctacacggttgaggaaatccccgctgaactcaaggaagaagccgaactggcctaccatgaactggtgagccgcgtggccgacgtggacgacgaacttgctgaaaaggttctcatggaagaacccttcacccccaaggaactcaaggaagccatccgccgcgccaccatcaccaacaagttcatccccgttgccggtggttccgccttcaagaacaagggcgtccagttcctgcttgacgccgtggtggattacctcccctctccggtggaaaccgttcccgcccacgctgaaagcacgctggatgcggaagaaaccttcaagattaccgctacggacgacgccaagcccatggttctggcattcaagctctgggctgacaagttcgtcggcaagctggtgttcatccgcgtgtacgccggcgtcctcaagaagggtgacaccgtgtacaacccgcgcacccgcaagacggaacgcgtgggccgcatcatccagatccaggctgaccagcacacggacattgacgccgtatactccggcgacatcgccgccatcgtgggcctgcgcaacgtgaccacgggcgacaccatcaccagcccggacaacgatgtctgcctggaaccccccaccttcccggaaaccgttatttccatggccgtggaacccaagaccaaggccgaccaggaaaaaatgtccaacgctctgggccgcctgtctgaagaagacccgaccttccgcgtgaagaccgacgaagaaaccggacaaaccctgatctccggcatgggtgaacttcacctggaaatcatcattgaccgcctgatgcgcgaattcaaggtggaagccgacatcggcaagccccagatcgcctaccgcgaaaccatcactgcccccgcccatggcgacggcaagctggtcaagcagtccggcggccgcggccagtacggccacgtggtgattgacgtgaagccgaacgaacgcggcaagggcctcaccatcgaaaacaagatcgtgggcggcgccattccgaaggaatacatgaacgccgtctatgccggcctcaatgaagccatgaccacgggcgttatcgccggttatccggtggtggacgtgcacgttgaagtggtggacggttcctaccacgaagtggactccaacgaaaacgcattcaagatggccgccatcttcgccatgaaggacgccttcaagaaggccaagcccatcatgctggaacccatcatgtccgttgaagcttccacgccgaccgactaccagggcgacatcatgggtgacctgaaccgccgccgcggccagatcagcaacatggaaaacaaggccaacgcctgcatcctgaaggccatggttcccttgtccgaaatgttcggttattccaccgccatccgtaccctttccagtggccgcgcctcctactccatggagccctcccactttgaacaggtgcctcagaacctcgttgaccagatcgtcaccgagaaggctaaataaacaaacctttgaagtataaccaatagaccgcacgtccatgcaaagtccaaaaatccgcattcgactccgcgcatttgactcccgcgccatcgaccgctcctcccaggagatcgttgaaaccgccaagcgcaccggagccaaagttcacggcccgatcccgttgccgacccgcattgaaaaattctccgtgaaccgttccgttcacgtcaacaagaagtcggctgaacaatttgaaatccgcacccacaagcgcctgctcgacatcgtcgatccgaccgcccgcacgattgatgagctcaagaagctcaatctcccggccggtgtggacatcacgatccgcatctagtttggtacccggataagtaattaaaaaacagaaagacacactacaatggctctaggacttatcggaaaaaaggtcggtatgacccgtctgtttgaccaggaatccggcgctatggtgcccgtgaccgtcattgacgtaaagggcaacaccttcgcccagatcaaaacggaagacaaggatggctacaacgccattcaggttgcctttgatgcgcagaaggaaagccgcgtggctaagcctcaggccggccacttcaagaaactgggcatccagcccaccaagctcctcaaggaattccgcgtggaagcttccgaactgcctgctgaaggtgctgaagatcccggcgtggacctcttttccgctggccagtgggttgacgtgatcggcacttccaaggggaagggcttccagggcgcgatgcgccgccacaacttccacggctctcccgccgcccacggttccatgatgcaccgccgtaccggtggtgtgggtggttgctccacccccggccgtgtctggaagaaccagaagatgcccggacagatgggcaatgccaagcgcacggtacagaacctgaaggttgtggccgtacgtccggaagacaacgtcattcttatctccggcgccgttcccggtgcacgcggttcctacctcgtgatccgccccgccaagaagaagtaaggctttagttaacctcacattgattataggaaaacctatctatgtccgcaaatacctttacattagaagccgccgctgccgccaacatccagcttgtaggcagtgacaagggctcccaggccgtgcatgacctcatcgtggcctaccaggcgaaccgccgcaccggttccgccaactccaagacccgcgctgaagtcagcggcaacaacaagaagatcttccgccagaagggcaccggtaatgcccgtcacggcgacaagcgcgctcccatctttgtgggcggcggcgtggtcttcggtccccgcccctgcgactacaccaagaaggtgaacaagagcacccgccgcctggccctgcgccgcgtcctgggcgatctgatcgccgcttccaaggtcagcaccgttgccgaattctccgtggccgacggcaagaccaagtccttcatcaaggccgtcaaggatctgacggacgccaggaaggtgctcatcgtagccgcctcctttgacgattccacctatcttgccggccgcaacgttcaggaagttctcctgatgaccgccgcagaagtgaacattgaacagctcatgaacgctgatgcagtgatcctcgttgacaacgctttagaaaccctcgccagccgtactgcttaagaagccatgaaagacatttaccaagtcatcaagaaggtgcgcatcagcgaaaaggccaccatgctccaggaaaccactggcgagctggtccttgaagttgaccgcgacgccaacaaaatcgaaatcaaaaaggctgtcgaagttgctttcggcaagaaggtcgcttccgtgcgcaccgccaactatgacggcaagctcaagcgtcagcgccgtgctgatgcaggtcgcaccgctcattggaaaaaagcttacatcaagcttgccaacggtgaaacccttgacctcgtttaaagccccctactaggaaggaaagctatcatgtccctcaagtcattcaagccagttactccctctaaccgctacaaggtgtggccgtcctttgacgaaatcaccacctctaccccggaaaagagtctctgcagacccctcaagaaatccggcggccgcaacaacaacggccgcatcaccacccgccacatcggcggtggccacaagcgcaagtatcgcctggtggacttcaagcgcaacaagtttgacgtgcccgccaccgtgcttaccatcgaatacgatcccaaccgcacctgccgcatcgccctgatcgaatacaaggacggtgaaaagtcctacatcctggctcctacgggcctccaggtgggcatgaaggtggaaagcggccagaaggttgctcccaaggtcggcaatgcgatgcccctgaagaacgttcccctgggtacctccgttcacaacattgaaatccgtccgggttccggcggcaaggttgcccgtgcagccggccagcaggccattgtttccaaccgtgaagcaggctatgcgctgatcaagatgccctccggcgaaatccgccgtttcaatgaggattgctactgcaccatcggtcaggttggcaatacccagcacatgaacgaaatgtccggcaaggccggccgcacccgctggatgggcgttcgtcccaccgtgcgcggtatgacgatgaaccccgtcgaccacccgaacggtggtggtgaaggcaagtccaagtccggcggcggtcgtcagcacctcaagtctccgtggggccacgtcaagggccagaagacccgccgtctccgcaagcccagcgactccgtcatcgtacagcgccgcaacgccaagtaaccaatacacaataactttaactaggatcatataacatgggacgttctctcaaaaaaggcccttttgtcagtcaaaagcttctcgccaagatcgacgctcagcttgaaaccggtgaccgcaagccgatcaagacctggagccgcgcatccatgattacgcctgacttcgtcggtctgaccttcctggtgcacgccggcaagaactttgccacggtgtacgtcacggaaaacatggtaggccacaagcttggtgaatttgccccgactcgtgtcttcaaacagcacggcggtatcggtaagaagtaatcagtaagttaacaatcaacatgtcgaactcttcttccatccttgcctattcccttaccacccttgtagggctgggcgggatactgcagggagcggaagaggatacggcggcactgacgcgcagaatcgagcgtctcgaaaagcagaatgcggccctcaaggcatcctatgtccaggcccgcagcgacgccgacaaggcggccgcccagctggtggacatccgtacccggctggaagctttgggaggcgcagcgctaggtaatagtgaggaacgcctgattcaggcggtggcagacatcgaagcctccaatgaccgcattcagcggctggagcaggcgtccgtcaagctctccggagccatcctcgcctacatgaaacaagccatatccgaggacgcaaatgcaaggacggcagtggaaagctccctgcgcctgctggagtccgttctgggatacaggcaacagcccgtgcgagatggcgcgggaaccctggcggaagccaaggtgctcagcattgactccgaatccggagtagtggtgctgaacgccggcagaacggcagggatgcaagtcgggatgcccgtacaggtgacccggggagcgcaaaccatcggagaagccgtagtcacggacgtccgcaaggaagtatgtggcgcgcttgttcagaaacttgcggcgcccgccgagccggtgcgcgtcggagattctgcctcagtaaaaaccaacgactaaatcatcttcatcaataacctgcactacgaggaaaaacccatggaagtgaaagctgtttacaaatacgcccgcatctctgccaagaagatgcgcgatattgctcaagaaattcaaggcttgtccgtctcccaggcgaccgacatcctgtcctacacccccaagaagggtgcctacctgctgaataagacgctcaagtccgccttggccaacgccgagaataatgcggaactgtccgttgacacgctggtggtcaagtccgtcatggtcgatgaaggccccacgatgcgccgcacgatgccccgcgcccgtggatccgccaacatgatccgcaagcgcacatcccatatcaccgtcgtactggccgatcaagaaggctaagtcattccaatctaacacacatatagctgaactaatatcatgggtcagaaagtaaatccaatcgggttccgcctcgccgtcaacaaggactggcgttccaagtggtacgccacgggccaggattacgccaccaagctgcatgaagacttggtgatgcgcaagtacatcaaggaacaattgatgtccgccgccgtctccagcatcgtgattgaacgcgcctggaacagcgtccgcattaccgtccacaccgcccgtccgggtcttgtcatcggccgcaagggtgaagaaattgaaaagatccgccagtacctccagggcctgtgcggcgcttccacccaggtcaacattgacatcgtggaaatccgttcccctgaaacggacgcccagctcatcgctgaaaacgtggccgtccagctggaacgccgtgtttccttccgtcgcgccatgaagcgcgccgtgcaggtagccatggaacgtggcgccgacggcatccgcatccgctgcgctggccgtctcggcggcgccgatatcgctcgtgccgaatggtaccgcgaaggcaaagtgccgttgcagacgctccgcaccccgattgactacggtttcgccgaagcccgcaccctgtacggcatcatcggcgtgaagtgctgggtcaacaagcgcgatgaagtcgtctcccagcagacctcacgcccgtccggcccccgcggtccccgtcgtccgcgtgcctaagaaagccgccatcacattgttcatcacacttaacacaaggaggaataagatatgcctttaatgcccaaaagagtgaagcaccgcaagatgcaccgcggcagccgttccggcaatgccaccagcggtacctatgttgcctttggtgacttcggccttcaggtgctcgaccgcggttggatcaccaacaaccagattgaagcctgccgtattgcgatcaaccgttacctgaaacgtaaaggtaaggtgttcatccgcattttcccgcagaagtcctttacgtcccgtcccccggatactcgtatgggtaagggcaagggcgccgtggaaggctgggtggccgttgtccgccccggcaacattctgtttgaagtaggcggcgtgaccgaatcccaggcccgtgaagcccttcgtctggcttccaacaagctgggcgtgccgacccgcttcgtctatcgtcaaggcgttcaacactaaagctactcatcaccatgtccgataagaattcccccaaagaacttcgtgctatgtccgccaaggagctttccgctctggtgcgcagccttcgtgaagaactcttcaatctccgtctccagcaggccaccggccagctggaaaacaaccagagaatccgcactgtccgcaaggaccttgcccgtgcccttaccatcaagggtgaaaccggggaagcgtaagctgaggatttccggtaacaacagaacattctaacacttttagaatccaatgtccgaacaaaccgaaacaaccaagaagcccggccttcgcaagacgcgcatcggcgtggtgacctccaccaagatggacaagaccatcgtcgtggaatacgttgcccgcgttccgcaccccaagttcaagaagatcgtcaagaagagcaagaagttctatgcccatgacgaaaattccacggccaaggtaggcgataaggtacgtatcgttgaaacccgcccgctttccaagctcaagtgctgggaactggtggaagtgcttacccactaatcaggaatcaaccattaaataaaggagatttgataccatgatccagatggaatccctagtccaggtggccgacaacaccggcgcccgctccgccaagatgattggcgtcatcggcaagcgcacccgtcaggcccacattggcgacattattacctgccacatccgcgagtccattcccaccgcttccgtgaagaagggtactgtggtgaaggccgtggtggtgcgcaccgccgccccgatccgccgtgatgacggctccgtgctccgctttgacggtaacgccgtcgtcattatcgacaaggacaacaatccgcgcggcacccgtattttcgggccggtcgcccgtgaactccgtgaaaagaagttcatgaagattgtttcccttgctccggaagtgctctaaccgagacacctcaggattttgaacgccgttctctgaagagaggacggcgtttttttgttgcccgtatttttccggtgaatgtgtgtttgaggcgtttttcatgagaaacaataaagtcaccggaactacgagtttgccgggcgtctgggaagagagtccggaatagtttatggagcaggttttttcctgtttttgaaacgtccggatggattcccgtgtttccgagttgggaacgtgtttttacatcgcacggcatggagatgtcgatacgggtttttcaggcggaagggaggcaagggcctcaggcggtctgtctgagagaatgtcttagggccgtgccgggggccaagagacttgagatgcgcccgttccgcttccggggagtggattacaggggatgatggcggaagacgcgggagccgctgatggaaggccatttcagagaattcggagagggaagtctgtttgtcccgtctgaatccggatttggggcccagggatagggcaaagagcgggaaacgcgttgttcgggattgctgttcttgctgccgccggacaggaaaggagcctttttccgggcgttacgcgcaggagaaaggacgggagatcccggggaggccaggcggagggggccacacgcacgctagtgtttgtgctgctccgcgcgggttttctccaactgctgggaggaaccgcaggccgggcaccggaaccagcggaagaggaatatatgcagagccgtggcaaatacgtagccgaagagggggatgcgatgggccgccttgttgcgggtgtattttttaaaggagaagacgtgggcgcggcatacgctgcatttccggggcaacgccagggaaagatacaggatcagcgccagaaaccaggggccgaagcagaggctgatgattaaccagccccgttccccgttgagaagcacgagggtgatgattgcgatggaaaagagggtgcagacgaagaggaggaggacggaggcggctcccagccatgtccggaaaggagtcatgtgcttgacgccctttttgcgcaggtaggtttttggctcttgccggacatggacgcgcttggcgggctggtagctttgttcttcctggcgccttgccttggtggagagatgtttcgcagggccgtcggcacgggggcgtggccgtttttccctgccgggtccggatgtccgcggagttgtcttcaccgccggagccagttccaccacgggagtggcaagcgggaggcttccatccgcgaaagcgtgcagtgcagccggttccggcgctgtgggcattgcaagcgcctggttcacccattccctgaaaacgggagccggaggtatttccgtgcgcagtttcagcatccgttttgcctgatggagttcaggcaaaacagtgaaagggtccgcggaagcgaattgttcaagagtacgtatgcccaccgcttccagcaattcaatgaattgctcacgaccggcaaagtactgttgaaggtcattcattcccggaagaatagatgattaggaaagggaatcaagcatccctttcagttgggcctgttttgcctcccaatccgccaggcgggctttttcctggtccacgacttccgccggggctctttctacaaagcccgcattgcccagcttggaggaggatttggcgatttccctggcaattttgtccagctccttgcccagtcgttccttttccgcttccacgtcaatgagtccttccaggggaaggaagagctctcccagcggcgtgagggccgcaggcgttcccttgggggcggagtaggcagcgtcccgggtgacggatttggcgtttgccagaatggacagccgggagaggatgtccagcgggacgtcatgggtggttttcaggatgaagctgacgtttttgttgttggagaggtcgtattccgccttcaggttccgggccttgttggccgtttcatagagagccgcagcctgggtgttcgccagcgtgatgcgggtttcgtccagccctgccagaagaccgtccgcggaggggagcggggtgcgcatgagcggaaggccgccgttggcgtccgcaaagcccagggaagcccagagttcctccgtgatgtgcggcatgaccggatgcagcagggccaggtagtgcctgagcaccgtgtccatggtggttagcgtggccgcccgtgccgcagggtccgctccgtccctcaaatctcccttgacggcttccaggaagcggtcgcagtattcgttccagaagaattggtacaggttctggatgagggcgttgaattcgtagtccgccagcgctttttccacatctgcatggagctgcttgagcttggagatgatggagatgtgcacgggggagtagtgcggcgcagcgtcttcctccgccgcgccctgcatcaggcggaagcgggtggcgttataaagtttgttggcaaagttcctgccctcgccgatctggttttcgtcaaagcgcacgtccgtgcccgtgggggcgatgcgcatgaggccgaagcggaggccgtccgcgccgtagttggcgatcaggtccagcgggtccggggagttgcccagggatttgctcattttacgtcctattttgtcgcggatgatggacgtgaagaagacgttgctgaacggcttgtcatgctggaagcggtagccggccatgatcatgcgggccacccagaagaagatgatgtccggtcccgtgacgaggtccgtggtggggtagaatttggcgcgggtttcgtcatccatggtggagaagggccacagccaggaggagaaccatgtgtccatcacgtcgctgtcctgagtccagttttccggatccgcgggcggctcggttcccacgtagaggaagccttgctccagggcggaggcgtccagagcaggggcgttcctgagttcttccgccttgtccttccggtaccagacggggatgcggtgcccccaccagagctggcgggagatgcaccagtcctggatgttttccagccagtgggcataggttttcgcccagcgcgcggggcggaaggtgatgtccccgccggccacggcgtccgccgcctccttcacgcacgggtatttgaggaaccattgcatggagaggcgcggttcgatcgggacgttggcgcgttcggagaagcccaccttgttgtcatagtcttcaattttgaccatgaggccggcggcttccagcatttccacggatttccggcgcgcatcaaagcggtccatgccgtgcagttccggcacttccgtgcagttgatatggccgtcgggggtgaggatgtctatgatttccagattgaatttccggcctatttcaaagtcggccttgtcatgggccggggtgattttcagagcgcccgtgccgaattctatttccacgtattcatccccgatgatgggaatgggggcggcgttgagcgggcgcatgacgtttttgccgatgaggtgggcgtaccgcgggtccttcgggttgacggccacggccacgtccgccatgatggtttccggacgggtggtggctacgtgaagggctccggagccgtcttccagcttgtagaggacggtgtaaagcttgcttttctgttccgtcatgatgacttcctcatcggagagggcggtgagggagacggggcaccagttgaccatgcggcggccgcggtagatgaggccttcccggaagaggtcaatgaatacctgcccgacggctttggtgtattcctcatccatcgtgaagcgttcgcggtcccagtcacaggagcagcccagcttgtggagctggttgatgatgatgccgccgtgtttttccttccattcccagactttttccaggaaggcttcacggcccaggtcatggcggctctttcccgtcgtctgcttgaggtccttttccacccgtacctgagtggcgattccggcgtggtccgtgcccggcagccacagggcttcatatcctttctggcgcgcgcggcgcaccaggatgtcctggatggtgttgttcagcacatggcccaggtggagcactcccgtgacgttggggggaggaatgacgacggagtaggcaggcttttcagaagccgggtcagccttgaaacaaccttcttcaatccagcgggattgccatttttcttccactagggacggatcatatgctttgggcagatcagacatgggcaaaagggtaccataaagtttttttctttcaatccctacctgccctgggatgggtggaaaaaccggctctttccgccccaggggcagcagtatgaaaaagccgccggctccctggcgggaaccggcggcctgaacggagttttttcaggatttatttgaccgtcacggtcgtctgggccggcttgaggccgttggagatgacctggagcgtcacttttccggattcacccttgcgggaacgcagaatgacctgggcaaggccgttgaaggccttgattttcatgatgtttttgttttccgggttcgccatggtggtgaagtccgtgggatcgccgttgcagatgccggcaatgtccgcggggccgcttaccttgaaggtgagctggtttttgctgcggggcaccatgcggccctgcgcgtcgcggacggccacggtgacgtaggagagatcatagccgtctcccttgatttcactgcggtccggcttgagggtgagcgccgccggttttccggtggtggttaccgtgtccgtagcccagggcttgccgtcttttttgacgacgactttgagggtgccgggcgtgtatttcacgtcttcccacacgaggcggtagcggtctttttcaccggtgccctttttgcggacgccctgggatttcccgttgaggaagagttccgcttcatccccgctggtgtagacatgcacgggcgttacctggcccttgcgttccggccagttccagtgcggcaggatgtgggccattttgacatccggcctccagtgggcctggtagatgtagaagcggtctttcttgaagccgcacaggtccacgatgccgaagtaggaactgcgggagggagcgcggttgcccagcttcttgagctcggccatcagtttttcacgttccggtccttccggcacgttcagggcgttggtggcgtccaggttgtacggggtgggttctcccaggtagtcgaaacccgtccacacgtattcgcccgcgctgttggggttgtcgtcctgggcggcgaattccacgtccgggcggtaggcccagccgggggcgtagaggtcataggagctgacttggtagaggaagaagcccttgctcttgttccagtccacggggaagaagtattctccgcgcgtgctgacgcaggaggaggtttcactggcgtagaagggctggtccgggcggtccttggagaaggccttgtacgcccagggcttgtagttgtagccatagacgtccatcgtgtccgcgaagccgttccgggcggccccggcgtcattgcagccggccgtcaccttgcgggtggggtcttcccggtggaagaggtccgtgaggttctgggagacgctatgcaggtttttgttgccctgttccggcacttcgttgcccgtgctccaggcgatgacgctgggatggttgcggtcccggtggcagaagttgaccaggtcgcgttcatgccattcgtcaaagtagttgtggtagtcctgcccttttttggcgctgtgccacatgtcgaagagttcgtcaatgaccaggatgcccattttgtcgcacaggtccagcacttccggcgcgggagggttgtgggacgtacggatggagttgacgccgaattccttcaggatttcaatctggcgttcatagccgcgcgtatgggcggctccgcccagcggccccaggtcatggtgctggcagacgcccttgagctgcacgcgctccccgttgaggtagaagcccgtgggcttccattcaatggtgcgcacgccaaagttcgtgagtttctggtcaatgaccttgtcgcccagcttgaccgtggttttcatcttgtacagatggggggcctcaagcgtccacagggtggggtttttaagcgtcagcgtgctggtgaccttgcctttttccccggcggggatcgcttcccccctggtggtggttgtggccactaccttgtcaccgtccagaatttcttccgtaacggagggggtgacggccttgtccgtggtgtttttcaccgtggtgtccacttccaccttggcggaggatttagtgatttccggggttttgacgaagacgccccagtgttcgatgtgcacggggttggattccgtgagccacacatggcggtggatgccgccgcccggataccagcgggaggagttggggggattgtccaccctgacggcgatggtgtttttctggccgaatttcaggaagggcgtgatgtccacgcggaaggagccgtacccgtatttccattcgccggccaggtctccgtttacatagattttcgggcgggacatgatgccgtcaaagtccagatagaattggttgcccttggcgtccgccggtacttccagcgttttgcggtaccagccgatgccgtcccacgggagcttgcctgtttcattgggaaggtccatgcggtatggcccttccacaccccagtcatgcggcaggttcagggagcgccagtttttgtcgttgaaaccggggctggagggatggtccgctttgctggctccggcggcggcctgcgggcggatgatttcccccttgtcgtttttaaaggtgatttcacggatgctggcccagttgctctggttgttgcccgtgacggtgacgcggaagtagcgtggcttgctggttttgttttccaccgtgtcttccttggagtcgttttgtccggaagttttgtcttcaatggtcgtccagcgttttccgtcaccggagccttccagcttgaaaagatggttgttttgtttttcccacaggatgctgacggttttcacgtccacggggcgtcccatgtccacagtgattttctccccgcttttgccgccgtcggcacaccagcgggtggacttgtccccgtccacggcattgtccgccggattgcctgattcctcactggtggcagtggcgaatcccatggcttttcccggttccggctgtgtgctgccatcaggcatttttccgaaacgggcaaatttccagttccaatccaggctctccgttttggtggcgtccaggggcgccgccatgaggctggcgatgctgaacgcagtaatgcagagggtcgtgcgtgtaatgttggtgaacatatctgtggtattacgactggaaatctgcaatcttgcaagatttttattcagcagaatgcggtttctgcacggattccgtcagcagggcttcacgtatccggcgggatgacttgcagccgccgtccggttatgtatggaggcgtcttccggaaatatggttgagaggaagctgcccccggtcaaagaaagaggacgaatgaatcggttggatggactggaaccgggggaatgaaaaagagaatgccggaccggccttgttgaatgggccggtccggcaacgggggaaaggggagaggcgggaggaactcagatgtacaccttgacgatggcttttttccggaggcgttccacccattttttatagcgttcattgctgcgcttgttgcgcgccatcatgtcgatctgctccttgatggcggaaagtggcggaggaggggccagttcctttttttccaccagcacgatggtgaagccggtagagtccaccagcggcccgatgatttcgccggtctgcgcgccaaagatgatggcggcggattccggggagagcgtggagcgctccgtgacgggccagtcgccgcctttttccgcatagaggtctttggagtaccgcttggccatgtcttcaaaggtggcgtttttggatttgatttccttggcgatgagttccgccaggttgagctgcacttccggcgtggaggcggagtcgtcccccagcatggggatgaagattttcttgaatttgattttgtccttggtcaggtcccggtattgttccttggttgcctcgtattcctgccgtatttcttccggggtgggcggtatttcctggtcgtatttggaggcgcgcatgatctggacctggagctgttttttcgtcatttcccggaaggcgcggatggtcatgccggagaggttgaggtttttcaggaaagcggagcggtcaccgttgaaggtggtcaggatggtgcggttgatttcctggtcaatgagggagtcgcggatgacgccgcccatgccttcgaattcgttgcggagcagttcgcgctccaccaggtcttcaatgatgttttttttcgccagggcgagctgtttgtagaattcgggaccctgtttggggtactgggccgcgagctgcgcgccgatgggcatgagccgcacgctgacttcattggcggtgatcgggcgaccgttgacggtggccgctatccggttgacgatgcgctggggctgcatgcgggaggccggcgcttcgttcggggagatgcgcttggattcgtccggacgcaccgtttctcttccttcatccccgtggagctgaacggcccggggaagggaggcccgggaatccacgatgctttgcgcctgtgcagataaggccatggtacagatgagaagcgcctggatgtgggttctgatattcatggaggggagaaaaagaagctttaatgtttccggatgatagggaacagccctgtaaagacaatctatttctgggtatgtatggataccgccctgcatggtagggagggccgtctccacacgtttgctgactgtggatgtgcttggtaaataccgtttttccctatacagtgtgcgccgatgcatgattgccgtttattgaggggagtgatccgttcctcccgtccggccaatattcccacgctgttcaccaatgcggccgtggcgtgggctgccgtccggggagcggagctgccgcctgccggcctgtatgcgggcgtggtgctgatggggctgtgcttttatttgtacggcatgtgggagaatgaccgtgtggatgccaggtgggacgcttcccgttatccggaccgtcccgtgccgtgcggcgcggtgagcgtgtccgtgctgaggctgctgtccctggtggccgggctgtccggcctggtgctgaatatggcgctgggcggggagtttgccgcgggcgctgtgctgctgatcgtgatttccctgtacaatatgtttcacaagttgtggagcggctccgtttttctgatggggctgtgccgcgggctgtgggtgctggctgccgggctggtgtttgcccatgcggccggggatcccgtgctgcccgcgtccctgctgtggtatgctttcggcctgtttgcgtttacctgcctgatttccatggtggcccggcgtgaagcgggcaggccccgggttcaggcggccgtggtgctgctgctttccggcatgtgcctgtttgatgcggtatggctgttgtgcctgggttccctgctgtggatcggcgccgttttattgtgggccggaacgcggctgctgcagaagctcggctgccgggctacataggtttggattgaatttacatggaaagtgtgcatcatctgacgcgagaaagtgggttatgaatgaattgatcatcaagatagggccgttgttctgggttttaagcattctggccgtgtacgcgctggcggttgttgcggagcggattttatatttccacaggattcagattaataccggggattttttaaggggcatttccaagctggtgaatgccggaaagacggatgaagcccggcatgaggcttccattctgcctggaccggcggcccgtgtggttgcctccgtgctggcgcatgccggattgcagcgtgaagagcttcggaccgtggcggaggattccgtgcagatggaggtgttccagattgagaagaatatccgcggcctcctggtggtggctacggtgagtccgctgataggcgtcctggggacgattcaggggctggtgggtttttattcccagccgggccttctggaagggaaggcccccaccctcgccatgtcggacgccgtttaccaagccctgctgagctccgccctggggctgagcattgcgattcccgcttatttgttttattcctacctggcttcccgctcccgccagatcgtgcattccctggaacgggccggcacggaggccgtgtgcctggtgtgcgacgcccgccagaggcgcgaggagggagagagcatggccggacggggagtgtaagcgtaacagggaaggaaaaaaggcatgcagatcaagacgcgctcaacgttgcccaccggggcgtttttcatgcaggtggtcgtcctgctggatttggtcgtgcttgtttgcgtgctgacgatcatgacttcccgcgtgggaatggcgtacgggtatgaggtgaaggccccgtcctcccgtttcctgatgaatattgtgggggatgtggagtttatttccgtcacggccggcgaccagcccgctttttacattgggaaccgcctgattgaaggcggccttcccggcgtttccgcagaattggaccggatttcccgggagaacgagggggatggagggggacgcgtggggattgccttgcggctggattccgccgtttctcgggctctggaacagcagttggtggatatggtgcttgccaagggaatgacgtgctatattgccgccgagcctgcggattgatttttttccattctgccgcatgaagctgaacaaaaagagccgggccaagattttcgacctccacgtggggttgacgtttgactggcgggagaccggcattttgcgctggcgcattttgctgtggatgcttttgttcggcgtttgcgcatccgtggccgccgtgtttgtccatgtggaggtgccgggagtccgccgccgtggggaccagccgggcgccgtggttctgcttcctgcggataatccgcgcctgcaccagtatgtgctgcgcaatactccgctgcccgtgaggggccccgtctgggctgatccggtgacagccggcccgatcggggaaacgggcgtgactctgccttccctgcgctccgccgatacgcctctggctcctcttccccccgtgtccgtccccaccgtggcggaccaggtgtggcgcatgtggcagcatccggatttccatatacgcgccatgatgaatccttccctggatgtttccggcacgtgcattccctacctgtctttttgttctccggggctggacggccggattgttacagccggctccctgtccggtttttccaggagcgaggaccatacggggctgagaagcgagttttttgtggtagtggacgtatggggcgttccctcccaggtgctgctgctggagtcttccggcagcaatggagcggacgagtccgccatgaggtttgcccgctccctgcgctgggttccgtcccgggagccgcggagcggcaccatgtccattgaatggaaggaggaagagccgtgagcatgacccttcacgattttttgctgcgcctgtttttgctggcgtccggcggtttttgcgccgtagtgttcatttgcctggcaatggggtgggtacggtctttcctggaccggaggcgcaaggtgcggtgccggatatgcgggttccggttttatgtggaggacgggaattcccatgcggagtgcccgcattgcggcgcggccaatagaaaaggctgaaaaaagccctgggcgggagatcgcgcagggcagtggggccggattaataaatccgcagggattcttcatcaatggggagcgagtccatgcccaggtcttccgcgccgtgcgttcccatttcctcccgcacatggatgacgtccacccggctgctcttgccttcaccggaacggtagcggatgcgcggttccctgatgacgacggtgttgccgcccatggcggcagcctccctggtgaagtagtcgatcagttccttgtcttccatggagacatggacaatgcgcccttcaggaccgttaaagtgccctacgttggtatattcccccatggggtattcgtcaatgaccagaacttcgttctgagggatgggcgcacgcggcgggccggaagtgaccggcgtccacgcattgggtcccgagggggaggaacaggctgcaatcagacttgtaatgaggcagaaggccagactgaaaaaaggcgctttcatggttgtcctgccgtcaataatcggcaggcggcacaaaaatgcaacggtaaacttcgttgccgtcatgaaagatttgcaccatgacacgttccggagttcttttaacgcagtaggagtcgtgctcttccggaatggggggcgcgtaacggcgcgtgccgcggcgtgcaaagacatgctggcggaatactcccacgacggcatgattgctcattttgacaatggtatagtagtcgctggtaggcagggtgatggaaggtggaacgtctttggcactcacgggcgggattatagagggcggctgaaaacaatgtcgaacctgaaatgtggcatgggatcacgtccggaacgttggcgcgctagtccgtccgccccatcatttcccgtgtttcctggatggtgcgggcctgggcctggcgagcgctcatcatggtgggttgttcaaagctctgccgcttggcttcaatgtcccggttgacggtgcgtccgagatgtttgtccgcctccttccaggagcggccctgaaggtcggattgctgcgtggcgtattgtttggaggcatcttgccaggactgggtattcacgcccttggcccgggcaatgaagtccggtgtttccagttttccatccgtgaaggatttgacgccgtcccatttcctggtttcaaactgtgtggcggctccgtcaaatttctttttttcaaaggcggtggtttcaaaggcctttttctcaaattgggacatgtcgccgttgtaccggagtccttcaaaggagctccgtttctgggagaccatcttggtgttgccttccttgtccgtctgctggccgaagccgccggcgaatttcgcctccagggcatccatcagctccgcgtccgtttttgccgagtccgggcgctgtttgggctgaaggctggtggtcaccgtacgttcggtggcgcaggagcagagccctgcggcggcgatcaggagaatgtgctgtatccggaacatgctcacggttccctatattcccgattgccgcgcaaattgcaaacaaaaaggcgcctccatcgctgaatggagacgcccggtgtaatttgtctggtccctgcggggattacttggaggcggtcagcttggcgacctggtccttcagttccttgccgaccttgaatttgacgacggagcgggccggaatcggcacgtcctggtcaggattcttgggattgcggcctaccttgggcttcacttccttcacctggaaggtaccaaagttgcgaatcaccacacggtcaccttccgcaagtgtgctggagataatgtccacggcacgctgtacgatgtcgaacacttcaatctgggtgaagttggtttcggcgctgatcttgttaacgaggtctcgttttgttaatgttttagccatatggagtgcagaatgatatgaatgtatgagttttatagttcagcgtgcgtgatttgtctcctaaaaaatcacacaatccgtggcatgcttgatttttgcgtcctcaaccgcgtgatgcggggattttgcttgaccggaacggtttgaatgcttccattattccccgccgggcgttccggcgccgggagggagcatatgcgcaccacgtttacaaccatgctgactgacgctcaggccggaaggcttgagtcccttcttgagggaaaggggtttgaaagaagggaggttccctacgcgcgcttttcctttgccgggccttccctgctggtgacggtttatgagaagaagaacaagcttcttctgcaggggaagggaacggacgattttatagagtttacgctggagccgcaggtgaccggcctgctgtcactgccggaggaagcggaagaggatgaggggaggacgggagcccatttcggcattgacgagagcggcaagggggattacttcggccctctggtggtggccggtgtttatgcggacgggcgcataggcgccgcgttgcgcaagctgggcgtctgtgacagcaagctggtgggttcttccgccagaatccgttccctggcggaagggatacgcagggtgcccggcatccggttccatctggtgagcatcggcccggagaggtacaaccagctttatccggagttcaagaatttgaaccgttttctggcctgggggcatgccacggtgattgagggcctggcggccaaggtgccggactgccccatggcgctgagcgaccagtttgccaatccgtttgtactgaaaagggccctggcggccaaaaagctgtccatcaggctggaacagcgcgtccgggcggaaagtgacgtggcggtggccgcggcgtccattctggcgcgcgaacgttttgtgaactggatggatgcggcgggagaggccgccggcatgaagctgccgctgggggcttccggccaggtagtaaaggccgctcgccagttggtggcccagcatggggagcagatgcttccaaaggtggccaagatgcatttcaagaccacgcagaacgtgctgaagtgaagggtcaggccggcgtggcgtagggcggcgcttcccttttccatttcccgtctcccacggagaggacggtgattctgaccctgtccagtccgtggtgtttcatgtccagccgttctgcagctttttcactcaggtcaatgatgcggtttttgatgaaggggccccggtcgttgacgcgcactttcacggtttttcccgtgcggagggactggacgagcacctcgcacgggaggggcagggtgggatgcgccgcgtgcaggtgccaggggcgcacgttttccccgatggccgtttctccgctgacgagcccccacagcgcgcattcattataatgggaggcgatgcccgtttgttcataggacagcgcctgttccacgttcatggggtggtagcggtggccccggatggtgtaggggcgggtcatgtagcccgtatagtcccggcttttgggtgaggaggagcaggaggctagccataacagcccagccagcatggccgctcccctgatgatgcccgtctgcatgccttattatatggccgggaagatggggtaatgcaagacgccgatgcgttttcccgctccggagaggacgccgccgccgggaatgctggcgtgtctgcggcagccgggccacagggacagggagagggatggaatggcctttgccgatcttgttttgattttggttgacttgactgggccgcttgcgtagcgttggtgcgattctgggaacttactacaaataatagataacataatgagcagacaggcattttatccgcatctctcagtggattgtgtgttgatcgggttcgatgaggaagggctgaaggtccttctggttgaaaagacacatgtcgcacccggccataccggcgctatttccaagctgcccggtgatttgatttatgaggaggaagaacttgacgccgccgcacgccgtatcctgtttgacatgaccggcatgtcttccccccatttggagcagttccataccttcggcgcgccgtcgcgcatcaagaatccggcggacagggagtgggtggaggccatctccggccagaagataggccgcctggtgacggtggcttacatggccatgctgaggatttccaccaagctgcgcaagctgatggagagccacaaaacccgctgggtgcccgtggacggcctgccggagctggcgtttgaccaccgggacattattgatctggctctggagaggatacgttcttccgtgaagaaggagcccgcgctgatttacgacatgctgcccgccaagtttacggcgcttcagctccggcggctgaatgaggagattcacggcaagcccatggacgtgcgcaatttccacaagaagatcgcctcccgtccctacattgtgccgctggatgagaaggaggagggcgtggcccaccgcgccgcgcgctattaccgttttgaccgcaagatttacaaccgcctttattaccggagctgatgccgtccggctgtccgggtgcggccgttccgccttgccgggcctcttcccgccatgtttgcggggaggggctcttctcatttgacagagtccgttttgtaacgcatcttatccgcacgttgattcccatgacagatccggccttcattccagacgattttttcaaggtgctggcgccttccgatatttttggaacggacggcccgtttgaagtggatctgggctgtggagacggagggttcctgctccagatggcggcccattatccggaacgccgttttctgggcattgagcggctgttgggccgcgtgcggggcgtttgctcccgggcagccgtccgcggcctggaaaacgtgaaggtgctccgggtggagagccgttatttcctggaatggatggtgcggcccggctgcgtttcccggctgcactatttgtgcccggacccgtggcccaaggagaggcaccacaagaaccgcctggtgcaggatgattttctgcccgtgctgcaccgttccctggcggacggcggggagttcctgtttaaaacggatcatgaggagtatttcctgtgggtgctgaaccatgtggcgcgcagcggcctgttcagcaggtccggttgggaggatgatgagtttttttatccccggacggatttccagcttcaatgggagtccatgggaaaaccgatttaccgcgcccgcttcattaaattgcagaaagcctgattccgatgccttttacacttcaccagaaagattcctccacggctgcgcgcctgggcacgcttgatttgccgcacggccgggttcccacccccatcttcatgccggtgggaacgcagggttccgtgaaaaccatgcatccgcaggatttggagacgctgggggcacggattattctggggaatacctaccatttgtccctgcgtcccggttccgccctgatccgggaaatgggcggcctgcaccggttttcctcctggaaccgccccattctgacggattccggcggtttccaggtctggtcccttgccaagctccgcaagattacggaggaaggggtgcgcttccagaaccatctggacggcgcgtacatgatgctgagtccggagcgttccatggagatccaggcggacttgggcagtgacattgccatgctgtttgacgagtgccccccttatccctgcgacaggaagtacgcggaagcctccctgggctatacgctccggtgggcgcgccgctgcaaggactgggtgcaggagcaccggccccgttccggggaagggcgtcagcaccatttcggcattgtgcaggggtccgtgtatgcggatttgagaaagaggtgcgcggaggaactggccgccatggagtttgacggttatgccatcgggggcgtttccgtgggagagccggaggaggagatgctccgggccatcgaccattccgcaccctggctgccggagaacaagccgcggtacgccatggggctgggcacgcctccccagctattggagatgatcgcccgcggcgtggacatgtttgactgcgtgatgcctacccgcctggcgcgccacggcgtggccctgactccggacggccccatgcatatcaagaaccagcgctgggcggcggattcccgcccgattgacccggaagggcatccgcatgtcacacaattctcccgcgcttacgtgcgccatctgttcaaagccggtgaaatactcgctttaagattgctttctttccagaatctggaattctatctccggctaatggctcaggcgcgtgaggccatagccgccggcacgttcggctccttcaaggattcattcatcgcgcggtacaaagcaaacgacattttatgaatatcttcatgttagcacaggctcaggatgcggcggccgccgccggacaggaaccctccaatatgttccagcagattctcagcagccccatgttcatgtttgtgatcatcatcgtcctgttctgggtgatgctgatccgcccccagagaaaggcccagaaggaacagcaggcgcgcatcgcggccctgcagcgcggggacaaggtggtcacgaacgccgggctgcacggatttgtggaaaaagtgaatgaccgcaccgtctccctcaagattgcggaaggcgtggtggttgaactggaaaagaacgccattgttcaagtggagaagtaaggttttccgccttccgtacgttttcagcatccgcccgtgtcgcctgacggcaggggcggatgtttatttttgaaaccgtcttttcccggcggggttaataagaatgatcatgagattgcctcacacgttcatcctgtcctgttccgcggcactggcgttcggttttctgccgcctgcggcaggtcagaccgcggcttccgtagaccgcagggaagaggagcctgttcccaggcccggactggaatgccttcaggtaaccctgctgattcgccagatggttctggaccggtatgacagcacaggaacgggcattttgtccgaacaggacaaggcccggctggtggaggatgcgcgcgctgcgcaaagggaagcccggaagaagttcctgatgcagtttgacaaggatggggacggaaagctttctccggaagagtacaaggccttccgggagcatgtggagaaacgccgcggttcccgcaggccggacgccgccccggacaagcggggcgagctgccccctcctcccccccctcccggcgaagggcgggaaatgcccatggtggaaatccggacggcggcccggaagcgcttcatggtggctcccggcctgttcctgctgacccggaacatgctgatgcagaagtatgacgccaacggaaacggccgcattgatccggaggagcatgccgctgtcatgaaggatgcggcggctctgtaccaggccagaatgaaggagatgatggacctttacgacctggaccaggatggcgtgctcagcccggtggagaaggagcaggctctggcggacagccataaggacagtcccctgtatgccatggaggaaccggacgacattgacctgttcatccgggcgaatatcagtgaagtgctgctgaaggaggctcccgtgaacagcggggaggaaaaggagaagggcacggaataattttattcttcatgatggagaaccctctggaaccggaacaggccttcctgcaatatctggaggtggaaaagcaggcctccccccatacggtggaggtatatgcccgcgcgctgcgccagttccgggcctgggcgggcgggatgttcacggggtgggaaaactgtactccggaccagatgagggactggctgttccaggaactgaaggatgaggccgccacggcctccatccgcctgaggtttgccgccctgcgcagtttttactgtttcatgatgcggcggcgcagcctggaagcgagcccgatgacgggcgtctccctccccaggaaaaagaaaaacctgcccgttttcctgacgcttaaccagatgctggaattgctggagctgccgtacaagacgcctgttcctgcgaatgcccccgcgtggcttccctaccgtgacgcggctattctggaacttttttattcctgcgggatgcgcctgagtgaactggtggggctggacgtcagcagcgtggaccaccgtttccggggggtgcgggtgatgggaaaggggcgcaaggagcgcattctgcctgtgggcgctcctgcgctggcggctctggaggcctatgcctccatggcctgcctgcctaagaattcccccctgtttgtctcccgcataggaacccggctcagcgcgcgcgccgttcagatgatgctggacaagtacgtgaagctgtcttccattcctttcaccatttccccccacaagatcaggcacacgtttgccacgcacattctggatgccggggcggatcttcgttccgtccaggaactgctgggccatgcctccctgtccaccactcagatttatacgcatgtgacgcgggccagaatggcggaagtttacaggcaggcgcatcccagggcataaggccgttttatcccatgacggaagaactcatattcgcaggaatcctgctgctctcccaggcgtctccgggccctgaccaggcttttgtcacccggagcaccctggcttacggctttggcgccggggtgatggcggctctgggcattggaacaggggtggtcgcccacgcggcgctggcttgcacggtgggggcttccgtttttcacagctccctggggctggtgcttttctgtgccgcctcctgctggatgctgtacctggcgtggaagatatggccgcgggggaggaagggcagccttgccgggagcggggatattcccccggcttccggcatttaccgggatgccctggtgaccaacctgatgaaccccaaggccacgttcttcttcgtggccctctccgccccgctgctggaaaagaatcatgacccttcctatgccctgttccttggcgcattgatcgtggtgactgggacggcggggtggattctgtgggctcttgttttccgctggcagcctatccggtccttttatgaccggcatgccggaggggtggatagagtgctgtctcttgtgctggcggggttcggcctcagcatgctgtactccttcgggcgcatggcggtggaaagtttttcctgatgtggagatgggagggaacggcttttttctcggaaaaataactctggtattgacaatgactccattatatcgcatacatctgcacccgctgtggggagctgaacgcgcacgcatgtgagtgacaaggcgcgcaagttccccattaacaccttttacttataattgatatggcagtagcaatcagactcaaccgtcagggttccaaggaccgtccttactataaaatcgtagttgtcgacagccgtgctcgtcgcgacggccgttacatcgaacaagtgggctcctatgatcccatgaaggaaggcgtcaactacaccatcaacctggaaaaggttgacaagtggcttgccaacggcgcgcagccctctgaaacggtcaattccatgatccgcaaggcccgcaaggcctaagcccggttcttcatcatctttcctgaaggcgttcctctgacggggaccgccttttgttgtttcttgcgctgatgcgggagaattgtcaggtggcatccctgcatcgggagcaccccgtgcatagaaaaacggcccggcgtcactgccggcgggactggaacaccctggcggattccagaatgccgaacgcgatctcatgaatgtggagattggccgtgtcaatggtcaggtgcgccgtttcccggtaaaaatcatgccgctctttcatgaggcgccccagcacggctttgggattgggctgctggagcagggggcggttggtgcatctggaaatgcgctggtacagggtgttcacatccgtatgaagccagacgacgaagcccagctttttcagcaggtcccggttttccggcctgatagtgatgccgccgcctgttgaaataatgcggctttgcctggccgccccatgcaattggcgcagaattccggtttccaggtcacggaaatgtgattctccatgagccttgaaaatctgcggaatgctcattcccgtctggtgctcgatcatctggtccgtatccgtgaaacgaaggctcgtctcccggtgcaattccttcccgatggtcgttttgccgcaccccatcagcccgatcaggatgatgtttggcaaggatgttggcgcggcccccttcatggcctgattgtactcaatccggcggcgtgagaaaacaactttttagccgtatggccttttccgtctccctcttccgctccgggcggaatgccgcaatgggaagggtcaaggagacccggtttggcaaataggggaaggccaggaaccttcatgtccggctgagatgccgcacttccgcgaatttgacggcttctcccctccggggaaggaggtcttacttgacgcaggagcttccttcaggcaaggataaggccatgcaaaccgaaatgttcgaggtagaccccctgtcagacaaccgcaagctgtatgtccgtgcggcggaagcgctggctgcgggagcgctggtgggaatccccacggagaccgtgtatggcctgggagcggatgccttgaatccggaagcggtagccagagtttttgaagccaagggaaggccctccttcgatcccctgattatccatgttcatcatggaaaggaggtggacaaatacaccgccattccggaggaactgaaggaactggtgcatacgctggcctccaaattctggccggggccgctgacgatggtattgccgaaggcggacatcatcccggacatcgtgaccagcggcctgcctacggtggccgtgcgcgtaagcgcgcatcccgccatgcgcggggtggcgaaagcgctgggccgccccgtggctgcgcccagcgccaaccgcttcggccatatcagccctacttccgcctccgccgtgcagaaggagctggatggacgcatagaaatgattctggacgccggagcctgctccgaggggctggaaagcaccatcgtgcgtcccatgcttgacgagaagggaaagcccgcgctggaattgctgcgtgaaggtccggtgacccgggagcagttccggaacctggtgaaggtggtgcgccgcaagcctgctgtccgtcccgtttcggaagaagctccggcggatgctccgggccagctcggcagccattacgctccgcgcaaacccatgacgctgctggaagccggggaagaattcgtgcccgtggaaggagtgcggtacggtttgctctcctatgagggaacgtctgatcttgcccaggagggcagttggacggaagtggtggccatgagccccggcagcggacggctggcggaggctgccgtgcgcctgtttgccctgatgaggcagatggatgaaaatgaagccattgatgtcatcgtggcggaacccgttccggaagccggactgggccgggccatcatggaccgcctgcgccgcgcctccgccgccagggaatgacttgtccacggctccccggatatgctacagttaccgcgaatccctttttgaacttatggccgctacgttatttgaaaaaatctgttccggggaaatccctgcagacatcgtgtaccaggatgaacaatgcgtctgcttccgggacatcagcccccaggctccggaacacctgctgctggttcctcgcaaacccattccccgcctttccggtgcaggggaggaagacgccgccctgctgggccatatgatgctggccgccggacgaattgcacggaccctccacctggatgaaagcggcttccgcctggtcatcaacaacggcccggacgccggagaggcggtaccccatctgcacatgcacctgctggcaggccgcaagctggaatggcctcccggttaggccggagcggaattagtgccgccggtgggagggaggggatgtgtcattcctgcccttttccggggatggtgccgccctgtctgcttgtcaggcgtggagtctgcctgtaagatgcattcatgaaaagattgctggtagagcttgaaaacttgccggaagcggggaaaaaatacagcggtgagctggattccgaaatcttcggcatcgatgatgaagaggttacttccattgggcctcttgcttttgacttgcaggtgcagagatttgaaaacgaattattcgtacggggcaatatttccgctccgttcaaattccgttgcgtgcgctgcctgggctactttgactacgtggtggaggtaagcgattttgccgcctcttttgaaattgacgcacagagtgttgtggacgtttcagactccatgagggaggaaatagtcctggattttcctgcctatccgaaatgtgcggacggaggcatggaaaatgactgtatggcgaaaactccatattttggagtggacaaagaggggggaacgggtgtaaacagttctgccccgagcaagaatagcggcgtgtgggacgccctcaatgagctgggggatcatcattaatcacctttttaccaactaaaattatggcagcacctaagcgcagaacgtccaagatgaagcagcgtacccgccttgccgcgcaggcatggcgtgctccgaagctccgcaagtgccagaattgcggcagcagcacccccggtcataccgcctgccccaattgcggtacgtacacgacccgctccggcaaggaaatcgtggtgaaggcggaagcgtaagctccgcaggcgccgcatttgccttgaaagttatcgccgtactgcggcgctaccatgtagacctctccagccgcttttgctccgcaaagcggctgaacttgcttgaagcaggctgttttttctgctaacacacttcttcaacaaatactatgaagattgcactggatgtgatgggcggcgacaatgcgcccgatattaacatggacggggcgaagcgggccctgcaggatttccctctcattgaaaaaatctatcttgtggggagggaagaggtggtgcgcagctcctgtgaccgctgggggctttccggtccgcgcgtggaaatcgttcccgccgcggaagtggtggaaatgaatgaatccgggctgctggcggtaaggaaaaagaaaaactcttccatgtccgtctccgtggacctggtcaagaccggggatgcggacgccgtggtcagcgcgggcaacacgggcgcggccgtagcggccgccaccatcaagctcaggctgctcgacggcgtggaacgcgcgggcatcgtgacccagcttccgaatgaattcggagtctgcaatgtgacggacaccggagccaatccggacgccaagccccgtcatctggtgggctatgccgttatggccagtattctggcacgttccgtatacggcaagccgatgcccaaggtgggcgtcatgagcaatggctccgaggatgaaaagggaacggactttaccaagggaactttttgtctgttgaagcatctggaggagcgcggcgcgctcccttttaaatttgtgggcaatgtggaaggccatgatctctttgaacatgaaatagacgtggcgctgacggacggctttaccgggaacgtcctgctgaaaacctgcgaagccaccgccaaggcgttcggcaaatggctgaaggaggaacttcaggcaaacccgctccgcatgatgggagccgcctgcgcttccggcgcattccgcgccatgaaggcgcgcctctctgcagactccgtggggggaagccccctgctgggcgtccggggcgtgacgatcattgcgcatggcagctccacccccgtcgctatccgcaatgccctgagagtctccatggaaatggtgcagcagggtgtcaatcccctcattgaagaggagatggccaggctgggcactattccggaggtttccgaagtgtaccccaaataatcaatcatgtttcattttctgaaaaaacatgccgcagcagcggcaaaagaaggaaaaaaaccggaagaggcggcctccgtgccccgttcccccggtgaccgcctggactccagcctggcggtatccgtgggcctgtgcgtgctggtcttcatcgttcttcaatggatgggcagttacagtccccattgggggaaatccgtctggcaccatgtgtcggaagcctttctgctcttctccgtgacgctggcgctgatgcccatgtactggctctgcgccggttccctgcgcaggaaaaacaaaacctttgtcgtcacgtggggcgccattctggtccagctcctgttctttggccttatccggcatgtgacggctgatattacgtccgacatcggcaacgaactcctgtacctgccctatatgatggcaccgctgattgtaacggtgctgctggggccgctgctgggcatgttcgccaccatctccatctgcatgctcggtggattcttcatcctgccggagcagtacgtaccggaaaagcaggtccaattctggatcttgagctccctctccggcatgctcaccgtgctgcttacccataacctgcggaaccgtgcccagttgctgcgcgcgggcttcttcgtggggctgctcgtcatggtgctgtgctgcatcatgggcgtcatcaatctccaggcgtgggactacaacctggtaggcgtactggtatgcctggctgtggcgtttggcgtaagcatgctgaccagcgttctgatcagcggcgtactgcctattatagaaggtgtctttaaaatcatcacgcccatttcctggctggaaatggcggacatgaaccgcccgctgatgaagaggctgcaaatggaagctccgggtaccttccaccactgcctgatggtcgcccagctggcggaagcggcggcggaagccatcggcgccaatcccattgaatgccgggtagcggcctattaccatgacatcggcaaaatgcagaaccccctctacttcattgaaaacatcatggacggccccaacccccatgatgagctcacgcccagcatgagcgcccgcatcatcatcgaccacgttcaggacggggtggagctggccagggcgaacaaccttccgcgtcctctggtggacgttattgagcagcatcacggcacctcgctggcctacttcttttaccggaaggcccttcaataccgggatgaaatcctgagccgggtggaaagcgggctggcctctccggatgatgtgccggaagtggtggaatccaacttccgctacaagggccccaacccccagagcaaggaaacgggcatcgtcagcctggcggacatcgtggaaagcgccacgcgctccatgggaaaaatctcctgtgaggaaatgcagaaaagggtggatgaactcctgaagcagagggtggtggacggccatttggacgattgcggccttaccttcggggatctcaagaaaatccgcaacagcttcatcaagacgctgaaaagcattcaccacaaccgcattgcgtatccttcccacaatccggaggcaaaaattgaaaagcctgttcttcctgtggtgactgccatgaaggaagaggaaaaagcggagaaaaaggaaggtgagggcaaaactgttccggaaatcatggaactgcccgatgccggccagcaggaaaagcccgcagaggtggagcagaaggacgggacggatacggagaaaaatgaaaccgcgtcttgaactttataatcatctggaagaagggcgtctcagtccgtccgttgcggatgccctggcccgcgccctggatgcctgcctccccgctgtgctggcattgcctgaaggccctgtgcccgttctctccggattggacgaggtggaaataagcgtggtggacgatgacgtgatccgggacgtgcacgcccgttttctgaatgatcccacggtgacggacgtcatcaccttcccgcatggggacggaatgggtgaaatcatcgtcagttatgataccgccatccggcaggcgtcggaattcaatgagccggttttcagggagctcttccggtacatggtgcatggtctcctgcacctgcacggctacatagacacggagccggaagaacgggaacgcatgttctcccgtcaggaaccgctggtgcgggaattcgggactgtcctggcaggcatctctttcccggataactgctgacccggcggctgaaagcgcgcttttaaaagatacgggcttgccaagccgagatgaactctgttaatctttttccgcaccatgcgtccatagctcagttggatagagcaactgccttctaagcagtgggtcactggttcgaatccagttggacgtgccatctttcggaaccccgtattctttttaagaaaaacggggttctttcatgtgagggaaaagtttctttcatcggtggaagcatccctgcaagaacggtggcacggggccggaaatggtgcaaatgcggatgggcggcctgaataaagcggcattatcccgtgtggctgtcttgctccgttgtcggaagaaatagcagttcccgttcttatcttgtgcacggaaaagggggcctcctgttcttcaatcaatcctgttgggcgatggaactgatggaatgggggccgtagttaaaaaatccttctgccgtcatcacaccggaaggggagggaagggcctccgaatgggcgccatactggatggaaagaaacggctcaggctggcgggaatactgaggagttccggagatggtccgcgcacggggctagtgcattcaatagcgcatgtattcacagaaagggaaccgggagacagaatatttttttattctgcctcccgggtgcaaatctctggggttctgatgaaaccggaagtttggagcggatttgaatattcatcctgaacgagtacatttacgcacaactccagaattttatgcatgccgtacatgggaaggtcgatctccggatggcgttcctgaaacttgtggataatgctcatttccgtctctgaaaaaatcacgggaatggtatttgatatttgaatcttccagggttcgccctcactcatcagcttgccgatgaaaagggactgggtgacgggaatgctgccgcgaaaggcaaaccaggtgtgcacggtgcggacggaaacccggcattgttccgccagccattggcgcgttttaccgtgtgtgcggagccattccttgattttaagcttttcaggattgttttctttctcagaggaagaagcgtttaaatccgcatcggcagccagctccggaatgattcgggaaagtgcttttttcgtattggccgatattttgcgaacgctcatctgtgcgtaaaacgtctggggccggattcctatttcctccgccaattggtaggacttgcggttttggcattgcagccattccttgaccatggtgcgtatatcgtcgtcagacatgaattgatgcaggttatgtgatgaaagaaaaaataggatggcagcgtttgaaacgctattttctctttccttggaactgttccgggatagtgaaccctgcttttaacttttgctcttgatgctggaaagagcatccaaagcctcactggcccattccggaacggtcaaaccgtggcgttccgcttcatttctgaacttctcatacttttgaggagtaacgggaacataaatactgttcgggttcttggtctgcaccaaacgtgcgtgtttggcgtattcctctttcatgattctgatgatgaggcgttgtcgtgcacggggaataggaacagtagaaagccatttatcaacctggcttttgctaacgccgcaaagatcggcgaactcgtcacgtgtcatcttcgtaagtgcaagaaactttctgatgctggacttcatttcatccatgcgcgcatttttcgcattcagaaaaatctggcaagccatttctggcatattttctattttagaaaataatattgtctttgtgtatccgaaaaggtaaattgtttttcctaaatccaatgaaactcaaaaaaatgtgaatcctggaagcgcctgttttcttattttagacgaaaaacttcatgtttaatattcttccttcttcaaggtatttttaccgctgttccggaaaaagagcgcccgttgggagggatactttctggttcatcttcttctattggcttgacgaagcccgttccgggagtaccgtgttatcatgttaaattcctctttattcgccttggggtgttccgcggtttttgtgatgtctgcgggaatgcctttactggctgcctctcctgaaaaaaaagaaaataaaacagccgcttctgcggatgctcttcccaccctttccctggagggattgccggaagtatggctgcagggaacgcctgtcaaggaatgggaaaaggacaaggtatacatctttgaattctgggccacctggtgcggaccgtgcctggccgccatgccccatatggaacaactgcatcaggcatttaaagacaacccgggcatgcagatcataggagtcaatgtcatggaccggaaatctccggaggctctgaaggaatttttaaaaaaccggccgtctccccttacttacacgatggcggtggatgtggatggaaagagaaccagggaaaaatggctggctcctatggatgtgaacggcattccgcatgcctttgccgtaaagaacggtaaactcatctggcgcggacatcccgtaaaactctcggaagaaatcatgcaggccatgttgaaacctgatttttccgccgcttcccttccgtcggaaaattctgatgcaggcgcccgtgaatggaagcgttatcgggaagtctcgaaaaagctgggcgaggtggtccggaaagaaggaaaacagggagccatggcgtttttaaagcaaatccaggattcaagggaatttcaacaggatcagatgattcaactgaagatgatcccgttcatcgtactggcggaaaaaggagaattccaggaagctcagtcggtacttgacagcttgtgcaaggaatatccggacaactaccgcgtgcagatcaatgtggctggaaccttgatggagggaaaatcagttcctgccggcaagatggatgccgctctggtggagcggtgcctgaaccgttgcattgaaatctcaaggaaaggcaacaaggaagcttcccttccctggcgtctgatgggtgaactccgggagcggcagggcaacatgaaggaagcgcttcgggatatggaaaaggcgctttccctgacctccatcagcaaggcgtggacgaagctgcagcagctttcgggcaattcggagacgtttcaatcccttgtggaccaggtagctgcggaaattaagccggagcctcctcggaaaatgcaggaaatggggcctgtgcaggaagacaaggaatacacgccccttttcagcaagctgaattggttcaatcatcccgggctgacgggcttgccttctgacaaaaccgtatttatcagcttctggagaggagctgcgaggaacaatggcatgtggagtgatggagctccggggaaaacgcttgatgtagtcctgaaaaaatatggtcttctggacaatcccaaggtgaaggctgtggtattgggtgtcattccgatggatcaaaaacagatgcaggaatatctgtctggtccggaaggatggactgcctaccctgtcggtattccgtcggaccattccgtgatggaactttttgattccctgaagcttaattcgttccctgccgccgccgtcgttcgtgacggaacattgctgtgggcaggggaaattaaaaggatgcccgcgtgggtggcggaaacggccctctgggactcttttgacaagaaccggtttgctgaggaggatgcgaagcgcaaagctcatcagcaggccctgcaggctgtcatcaaaaaatcttttgaactgcgcaaggaaaagaaatttgatgaatacaaaaaactgattgaggaaaacgccgagcgatttgccgatgacggatggtttgcctctacagtggcggaagttcaggcggggaaagcctggaaggagaaggactaccaaaaggtggcggacatcatagaccaggtgctgaagcgttttccgaaggaagattccctggcttcttacctcctgaaaatcctgaatgggtcggatgaaatgcgtggatacaactatcaagcggcccggcatgccctccagatcatgaaagacttcaatacgcgggatgacggtggttataatgcggcttgctatcaagtcatgatggaaatggccatggagaaaaaagactacgcccaggcgaaaaaagacgctgtgaatgcactccgggaattacccctcatgcaccagtatgtagccatgaagaaaaaacaggcggaagcttaagaattctgaaacgtttaggcccctttcgtgatgaaaggggccttttttgcgggaaaagagaaaaatgtaatacgttaataatcagtaatatttagaatgctaaaaaaatctccgcaaaaacgactcgaaaaaaattgacaagggaggtgaaaatggtagacttctcggcacgccaacacggcgacgggatgaaaagcccggcggcaggagggactcggaagagggcctgaatgaagccggggccggccacccggaagagcctcattaaaggggccgataagaagatttcaagggaatgactaccgaacccgccgagggttttcctgaatgcgtcgagaggacgtgcgagggagaaaaaacccgaaggagcgacctagctccgagaggggcggattggtagaagcaaggggaaagaaaaaaggtcgtgacgcgcgccgtgcttggcagagcgaagaggacctcaagagacacaacttgagggaagagctgactgaagcatggcgcagatgaaatcgaaagattccatttggtccagcaatttcaaaaattatatttgatggagagtttgattctggctcagaacgaacgctggcggcgtggataagacatgcaagtcgaacgggagaattgctagcttgctaataattctctagtggcgcacgggtgagtaacacgtgagtaacctgcccccaagagtgggatagccccgggaaactgggattaataccgcataaaatcgcaagattaaagcagcaatgcgcttggggatgggctcgcgtcctattagttagttggtgaggtaacggctcaccaaggcgatgacgggtagccggtctgagaggatgtccggccacactggaactgagacacggtccagacacctacgggtggcagcagtcgagaatcattcacaatgggggaaaccctgatggtgcgacgccgcgtgggggaatgaaggtcttcggattgtaaacccctgtcatgtgggagcaaattaaaaagatagtaccacaagaggaagagacggctaactctgtgccagcagccgcggtaatacagaggtctcaagcgttgttcggaatcactgggcgtaaagcgtgcgtaggcggtttcgtaagtcgtgtgtgaaaggcgggggctcaacccccggactgcacatgatactgcgagactagagtaatggagggggaaccggaattctcggtgtagcagtgaaatgcgtagatatcgagaggaacactcgtggcgaaggcgggttcctggacattaactgacgctgaggcacgaaggccaggggagcgaaagggattagatacccctgtagtcctggcagtaaacggtgcacgcttggtgtgcggggaatcgaccccctgcgtgccggagctaacgcgttaagcgtgccgcctggggagtacggtcgcaagattaaaactcaaagaaattgacggggacccgcacaagcggtggagtatgtggcttaattcgatgcaacgcgaagaaccttacctgggcttgacatgtaatgaacaacatgtgaaagcatgcgactcttcggaggcgttacacaggtgctgcatggccgtcgtcagctcgtgtcgtgagatgtttggttaagtccagcaacgagcgcaacccctgttgccagttaccagcacgtaaaggtggggactctggcgagactgcccagatcaactgggaggaaggtggggacgacgtcaggtcagtatggcccttatgcccagggctgcacacgtactacaatgcccagtacagagggggccgaagccgcgaggcggaggaaatcctaaaaactgggcccagttcggactgtaggctgcaacccgcctacacgaagccggaatcgctagtaatggcgcatcagctacggcgccgtgaatacgttcccgggtcttgtacacaccgcccgtcacatcatggaagccggtcgcacccgaagtatctgaagccaaccgcaaggaggcagggtcctaaggtgagactggtaactgggatgaagtcgtaacaaggtagccgtaggggaacctgcggctggatcacctcctttctatggagaaagtgcatgaaaaatgcacaggtcggatctcttcccgagggaagagagagcggaacccgcgagggcccgcaacgaaccaaagatgtgtaaacagccagttcgcttggagcgaaactaggcacgacgtgcgtgacgaccttttttcaaaaagaaccgcaactgggggtatagctcagttggtagagcgccagctttgcaagctggatgtccggggttcgagtccccgtgcctccaccagtttcggtaagaaggcggcaacggagaacggtaaatggctattaactattacctgttcgctgttaactgcctctgcgagacccaaaaccgggcctgtagctcagttggttagagcacgcgcttgataagcgcggggtcacaggttcaagtcctgtcaggcccaccaaaaaaatcgattattgagggaaagcgaaaattgacatctgcgtggcaaagaaaacaattgctgagaagcaattgctttccaacaaagtgggtagttgaaaaacaactacaatacacaatttaaaacatgcataccaagaaataagacaatacagtaagtcacgaaagggctttgtggtattgtggaagtggtaaaaaacttttgcaatatgatgaagtaagtaagggcgtacggtgaatgccttggtgccaacaggcgaagaaggacgcggcaagctgcgaaaatcctcgggaagctgcaagcaagcgatgatccgggggtatccgaatggggtaacctgatcgaggcaatactcgatcgttcatacctgaatacatagggtatgaaacgcgaaacccgctgaagtgaaacatctcagtaagcggaggaaaagaaagagaaatcgattccgtaagtagtggcgagcgaaagcggatggagcccaaaccgaaggtactccttcggggttgtaggaccacgacatattcgaccatactggatagtagaacagcctggaaaggctggccgtagaaggtgaaagccctgtagacgaaatccagcgtgggaattagtgggatcctgagtaatacatcacacgtggaacgatgtatgaatcagcgcggaccaccgcgcaaggctaaatactagttggcgaccgatagtgaacaagtaccgcgagggaaaggtgaaaagaaccgctgtgagcggagtgaaatagaacctgaaaccgtatgtctacaaagtgtcagagcagagcaatctgcgatggcgtgccttttgtttaatgagtctgcgagtcagtgtttgtggcaagactaagggcttccggcccggagtcgcagcgaaagcaagtccgaatagggcgaattaagtcgcaggtactggacccgaagcggaggtgacctacccttggccaggttgaagcatgggtaaaaccatgtggaggaccgaacaggtgaacgttgaaaagttctctgatgagctgagggtaggagtgaaaggctaatcaaaccccgtgatagctggttctcttcgaaatgcatttaggtgcagcgtcacgtgctgatgcgcgggggtagagcactgacaaggctagggggcacacccgcttaccaaaccttatcaaactccgaataccgtgcaatggaacgtggcagtgagacagtgggggataagcttcattgtcgagagggaaacaacccagaccagcagctaaggtgcctaaataacgctcagtggaaaggatgtgggattacacagacagtgaggatgttggcttagaagcagccaccatttaaaaaatgcgtaatagcttactcatcgagtgatcctgcgccgaaaatgattggcgatcaagcgttataccgaagctctggactttaccttacggtagagtggtagaagagcgttgcatgcgcgttgaagggtgatggcgactgaccctggagcacatgcaagtgagtatgcagacatgagtaacgtaaagccgggtgaaatccccggccgccgtaaacccgaggtttccagggcaacgtgtttcgtccctgggttagccgggacctaagccgaggccgagaggcgtaggcgatggatatcaggttaataatcctgagctcgcgacccttaaactggggggacgcatgagaaaagatgactaggttattgaattccgagttgagtccacggactcagcgcatcattggatcgagtgccaagaaaagccccagcgtatgctaagcgacccgtaccgcaaaccgacacaggtgggtgggtagaatataccaaggcgtaagagtgaaacctggttaaggaactcggcaaattagccccgtaacttcggaagaaggggtgcctgcagcgatgcaggccgcagagaaatggcccaaccgactgtttatcaaaaacacagcactctgcaaagacgcaagtcgaagtatagggtgtgacacgtgaccaatgccgaaagattaaggcaaggggttagccgcaaggcgaagctctgaacccaagtcccggtgaatgtcggccgtaactataacggtcctaaggtagcgaaattccttgtcgggtaagttccgacctgcacgaatcgtgaaacgagttgggcactgtctcaaccaggcgctcagtgaaattgtagtggcggtgaagatgccgcctacccgcagaaggacggaaagaccctatagaccttaactgtaagctgtcattgtttcttcggttttaatgctcagagtaagtgggagacgctgaagacgccctttagggggcgtcggagtcatcaatgagacaccaccctttgaaactggaggatctaaccctgagccgtgaatccggccagaggaccgtgtcagccggtcagttttactggggcggtatcctcccaaagagtaacggaggagcgcgaaggtgggctcagcccggttggcaaccgggtgtcgagtgcatgggcataagcccgcctaactgtgagaccaacaagtcgagcagatgcgaaagcaggcccaagtgatccggcggtagaaagtggaattgccgtcgctcaacggataaaaggtaccttagggataacaggctgatcacgcccaagagttcatatcgacggcgtggtttggcacctcgatgtcggctcgtcgcatcctggggctggagaaggtcccaagggtccggctgttcgccggttaaagcggcacgcgagctgggttcagaacgtcgcgagacagttcggtcctctatcctctgtgggcgttggaaaattgaggggttcagaccttagtacgagaggaccgggtctgacgcaccactggtgcatcggttgtactgtcaagtgcatggccgagtagctaagtgcggacgggataagcgctgaaagcatctaagcgccaagcccatcccaagatgagttttccctataggttcgtggaagaccaccacgttgataggtcgcaggtgtaagtgcagcaatgtattgagccaagcgatactaatcaccaatagacttcatcatattacatcactcccgttcgtgaataacaacttgctgttgtcttgttcattggatgtatgtttaaaagtaacaccaccagccacgcagatgtcagtttacgctgattccttcccctcgtaacgagaggaaatcttcttagccacacacacaacaacccttaaaaaatccccctcaaagcccccccaagggctcccgggcaggcaggatgaagaaaatgaaaaactcttccccctgaagcccggtggccagagcgcagtggtcccacccggtcccgttccgaacccggaagtgaaacgctgccgcgccaatggtagtcggacgataggtcccgcaagagtaggtcgccgccgggattttttttcatcaggccccgccagttcctcaactggcggggcttgttcgttttcttgatggaacgatcttgaatctccttctcttcctctactttgctaaaaggaactgaaggaggatgaggcaaacaaggaggacggctatccctgtcgtaatagagttcttaccttacgtaacattttcttaactatcactctttctttattaacggtttaagaatattcctgctattgacggcacccgttcttccatcaaaaatggcggcgtatgaaatcccatatcattcagaagcccgttgcggtcatcctggggaacgccggcaacataggatacctcgccgccaaggcgtttgcgtgccggggaactgtggttgccatgctgcatgaagccggtgaagagtcttcccgcgtggtggactgtctgccagggggcaatcactttggcatgtcgggctgtctgggccatcctccggatctggcttccttcgcagggctggtacataccctctatggacgagtcgattatttgatcaactgtgaggatgccgcggttgaggtgcagggcctgaattgttccgcacgcagtcgcctgtccattctgcttgagcacgcttttgtttccggcgccatgattgtgaatatggtctcccgttccggaagaaaggtaagatggagggaacagtgttggaaggaagatgccgcagggttggagaattgtctgaataggaaggacgtcaggataaaccaggttgtgattcaccgtccggtatttcggcacgtctcccagtccaggctggcttcctccgcgtgtgcggcggcgttatttctgtgcgggagggaagggcgtcatattcaccgtgaatacatcgttgtcaatggaagaaaagccgcttggaagcccggcatgaggacggaagcatctctttccttgttcaactcctgtctggaattttgttccgtctgttcccgaacggtattccgggatgcctgacaggcatgccatatttctgtattctgtcgtgacaaaaagtgtctgttaatatagtatatttccaagtaaggttatgaagtttcaaggtctttatacagcaattgtgactccgtttgtcggcaatcgggtcgatgaagaggcttttagaatgcttgtggaagcccaggtggctgccggcgtggccggcattgtggccgtcggcaccacgggtgaatcccccaccttgactgtaaaagaacacttgagggtgattgaactggccgtggagagcgcggcaggccgcattcaggtagttgcaggtacgggtgccaattctaccgcggaggccatccatatgacccaggaggcggagaagatgggcgtggacggtactcttcaggtgtgcccttattacaacaagccctcccaggatggcgtttatgcccatttcaaggccattgcggacgccacccgcctgccgatcatgctgtacagcatcccgggccgttgcggtattgaaatcagcgtggagacggtgggacgcctggcaaaggactgtccccacattatttgcgtgaaagaggccggcggcagcgtggaccgcgtgaaccagctgatgcaggtggttccggaagattttaccgtcctgtgcggtgatgatggcctgacggttccctttatggcctgtggcgccagtggcttggtttccgtaacgtccaatctggttcccggaatcatgaattccatcgtgaaagccggcctggatcagaatatgggtgaaatgctttccctccagaaaacattttatccactgatgaagggcctcatgacactggattccaaccccgtcccgatcaaggcggcgctggcgctgaggggggatatccagcccggcgtgcggcttccgctggttcctttgccggaagaaaaggaagcccagctttccgcgcttcttcaacgtttcaacgttctttgatatctcaactatatgatttccattcttgttacaggcatttcgggccgcatgggccaggctgtccaggaggcggtgacgcagaatccggacacctgcgtgggcgccacgtacgaccaggggcaggagctttatccggctctcgccaaatgcgacgtcgccattgatttttcccaccatgctttcaccagcaccctgctggcggaagccgtagccaataacaagcccctggtgataggcaccacggggcatacggagctggaacgtcaggagattatggatgcagccgcatccatcccgatcgtatttgcgtccaactattccgcaggagtaaacgccctgttctggctgacgcgcaaggcggcccagatcctgggcggcagctgcgacattgaggtgatggaaatgcatcaccgccacaagattgacgctccttccggcacggcccggacgctggcggaaatcctgtccggcgccattggcaggaattatgaagacagcgtggtttttggccgcgaaggcctggtgggtccccgtcccgccaatgaaataggcatgcattccctgcgcggaggggatgtagtaggagaccataccgtggtgttcgcctctgacggagaacgtttggagcttacccacaaggcatccagccgcatgacgtttgcctccggagcggtccgtgcagctctctggctgcagggcagggaaccggggctgtataccatggaagacgttctgggcctttcccaattataatttttccgcatcatggccgtctccccttcccggaacggccatgatgccttttttgctgatgaagagagccggcatcgcactgggatccaatatgggggacaaaaacagcctgatggttcaggccagggaccatctgctgaagatgagcctgtccgacgatcctttcctgcaatcctccctgtatgctaccagtccgcagggatgtccgcatggcgcggatgattatttgaatgccgtggtggagttcacctggcccggtacggtggaagaactgctggtgcattgccagggcatagaacgcgccctgggacgcatccgttccggaatccgctgcgaaccccgtacggcggacgtggacatcatttacgcgggggacatggtggtcaacgatccgccccgcctgattctcccccatcccagagctcatttgagaaaatttgtcttgaagcctctttccgacatcaggccggacctcattctgccccgccaggctaaaacggtttcctgcctgctggcggaactggatacggatgaggctgacccgctcctggtatcggaacgctggtaactgcatgtttatagaacatcatgaatcaatctcttgaaaaagcggaacgcatccgtgcctgcaagaacaggcggcacgtgacgctggtgactgcttatgactaccctacgggccgccttctggatgaggccggcgtggatattgtgctggtaggcgattccgtgggaatggtgcttctggggtttccggataccacccatgtgacgctggaccacatgattcaccatgtggaagccacggcgcgcggcgtgaagaatgccctgctggtgggagatatgcccattcatacctatgatacggtggagcaggccgtgcagtctgcaaggaggctgttccaggccggagcggacgccgtcaagctggaggggggtgccgcccaggcggaaaagatacgtgccattgtggatgccggcattcccgtggtagggcatatcggcctcttgccgcaaaaggtgctggaggaaggcggatataaaatcaaagggaaatcctccgctgaggaggaagctctggtgaaggatgtggaagccgtggcggaggcgggcgcctgcgctgtggtcgtggagggcgtgacgcctcatgcggcccgccagattaccgtgcattcccccattcccacgctgggcatcggttccggcgcgcatacgtgtgacggggacgtggtggtgattcatgacttggtgggggcgttcccgtggtttgtcccggccttcgtcaaaccgcgagcggatgtggccggcagcatgactgccgccgtcagggaatggatgaaggattcctatacggaccccggctccatcagttcataacagttgaccgttgcctatgctggtattttctacatgctggaactcccaccgccaccaggacggggaagagatgattgatgaaatcctctccctgggatttgaccatgtggaactttcccacggcatcaagctttcccttctgcccggcatcatgagggcggtggaagccggaaaggttcaggtggccggggtccataattatttcccggcacccatcgacgaggtgggggacgctccggacagcaggccgtttaccgcagatttgccgcaggtgcgcgccaaggcgattgagctgacgaaaaaatccatggagcagggggccgccctgggcgccggatacattgtgctgcacatggggacggtggaacctctggtgaagcgtacggatacggctcatttgcagagcctggcgcgtcagggaatggtggaaacggagtcatttgccggaaccaagggggagtttgtgcgccgccgcaaccggcttgctcccgtttatctggaacgtgcccgtgaggccatccggcagcttctgccccatgctgcggaacttggcgtaaagctgggcattgaagggcgcagccattatgaacaggttcccagcgaggatgaaatgggcctgctgatgcaggaatttggggaaaatcccttcatcgggtactggcatgacttcggtcatattcaaaggaagcacaatctccttatattgaatcatgaacaatttctccgcaggatgtcttcccatttgataggtgggcatgtaaacgatgtcaagtggccgtcgcgggaccaccaggttcccctgctgggcggcggagtgccgtttgaacgcctgttgtcttttttcccgcatggagttccgctcgtctgggaactctccggacgcgcttccgcggaggacatccgtgcggcgcgcgaattgtggacggaaaagtttccggagactctggactgaccatcttgtgattgtaaatacggctcattggatataaagtcggcacgatgatagacaagacgacatcccgcgtcattctgggccttctgggaacggcctgcatcctgattacggcgtttgcctggtataaaaccagccatgccgcctctccggatgccgggatgcgccataatatttatgatgaggatgttccccggtctgctccggtgtctgtggattaccggatgattttgctgacgccccaggagctggcaaaggctccgctggcggatgcgttcacgtcccctctcggagatgaaaacggcgcctttacctatgttgcccagggactgggtgatatgaatgccgcccgtggagggaggcataccggacaggatttgaatgggattggcggcgagaacacggatgagggactgcccgtgagggccgccggacgcgggctgttgatttacgcgggagagccttcgccggactggggcaatgtcgtcgtcctgctccaccgcctgccggacgggcgttttgtgcagagcctgtacgctcatttgaaaaccgtcagcgacattcctttggggtcactggtggggcgcggagagcagatcggcacggtcggaacggcgcacggcaattatctggcgcatctgcattttgagatgattgaatccatcgcccatgaagcgggaatgccgggctatggaaaaacgacgttcaaccggatcaatccggatgaagtattgaaacaatacgctccctccccggaaatgatgatgcctgatcccgttattgccctgaaacaggttcaaatggcggcgggatgggaaaagctgctggagaacctgtacaaggacaatagtatggaagcgctggataaaatccttccggacgaccgtccggacacggaggaaaagggagaccgctgaccccggcgttttccccgtcaggagcgtgtgtccggatttttggagaccagctcctgctgtttcctggtgatttgcaggacgcagaccagccacagaatgctggccgccgtcatcagcgagccgatcaccagaaatgccgtcaggtaatgttccgccccaaaggggaagagcgcgcacagggtcaaagccgtggtaacgagcagatacagccgcagcgaccgggagggggcttgcagcatccatgccgccggattctttgaagcccggtataattcctgaaggatcagggcattgagcaccatgccgactaccggcatgcagctcaggaggacgctcaggaatggcgtgaaccgcagccccggaatttggaagccctggacattggcggatgcccggtacagccagatcaactggatgagcagggaaggaatgaacaggatgctgaaaaggaaaaccagcggaaccgcgaaggacggcaggtgagccatgttctgctggatgagcatctggatttcctcataattggtgacgttgttggagaaaacaatccagctgctccagagcatgaaaggcagcagcacgaagcacgccaggatggataatttggcaagcccggccagaggataacgcaaacggtattcctgttccgctggctggttttgctcctctgtctcctgcaattctttccggacgggggacattgacggcagaacctggtccacaggctgccatccatccatgccctgtttccaggtgagcgttgttgagtcgatcacgccctgtcccagaaattcacggacttcatattcggaataggctctcggctgggaatcgccggggagtttcaggaagtattcactcattacctgtattttagaaaaagaagcaggctctgggcaatgggaatttgacggatgactgataaagtcccatgccaggtgcctggccttgaataaaagccatgtcgcaagtcgtcagagcgccgggggctattaaatttccggaatggataggccgcttttcctgtgcatatctctccttacgaacaagataatgctgttgtgcatggaaccgcaggagagagggctcaagctggtgttcaagtaaaagtacgggggcaggaaagtttatcagcaaggtcgcggaatacacaagtcgaaaaagagaaagaccttgtaacatgaatgaattacaaggtcttgcaatgggaaaatatggtcgagctgacaggattcgaacctgcgacctcttcgtcccgaacgaagcgcgctaccagcctgcgctacagctcgttgtttgtggtgcggcgaagtctacggttgaaaggagggtttgtccagttttttttattcgccgcggcacttggttgtgatacggtgccggggttatgatggatatgctggtacggctgtatgatttgcccgatattgaagaagagctgcggaagctggagaaggacggcattttgatccggcggccgggggcttatgaacgccatttggtggctggatgggtaggccggattttttctcccaagtgggtgagtgaaacgaagactgcattcagccgccagcccatttcctgttatattgccacacgggagaagaagattcttggctttgcctgctatgacgtgacggcgcgcggttttcttggccccatgggggttgcggaggaggcgcgcaagagcggcgtgggcaaggttttgctggtttccgcattgaacgcgctccgtgagatggggcatgcctacggcatcatcggcggggtagggccggccgatttttatgcccggacggtaggcgcgatgcccattgaagggagctctcccggcatttacgtggatattctgccggagccctgattccgcctgttgcggaattcatttccggttccggatggccccttttccggcccatccaaaggatggaaccggaagttgttattttttataccctaccggatggcagagcatgggcgtttggggggaggccagtttcagggcttttgccagggcctccttgttcatgctggcccgtgggtaggtagccagtcccgttccggagcagaacagggagatgttctgggagacgatgccggcgtccatggctgcccagggttccgccgtgtccgtcacaagaaccaggcaaacgggcgcgtccgccgggcgcgcgtccccgtcgcttacggggaccatggcgtgggccttgtggtcatagaggtaggaggcgtctttcgtgcatacgtaaattttgacgtcctgccggttcatggcggacggggcggtacgcttgccggattcctggcggttgattccgttggcggcccagagcaggtctgacagatctttttgggagagcattttttcagaaaagctccggatggattggcggtcagacagggctttcataattggcgccccccgttccaggtccggctggtccagtttgacgggttccgcggcgtgaaggaggactgttccggacagccccgcagcgaggagggacaggatgatttttttcatggctttgcggcgggagtggttgacggatgcggatgttccgcattttcccattagccggaatttaacatggggagggagggctacaaggtttttgtgcgcttgtttttgccgccatccgtcggggcgctgcagggccggaaaaaaatcggaaggagtttttcaagaaaagccttgagttcttgcgtgaaactggtattgaaggcaaccgatttttcgcccggcgggggaaggcgccccgattgcccgccggccaataaggggccatgagaaaaatcggcaatactaactcatcaaccatttaaatgagcacaactgaactggcggaacttattgacagcaagttccgcgaattgcgtgaaggttccatcgttaccggaaccatccaggaaatccgtccccaagtcgttttggtggacatcggctacaagtccgaaggcgctatttccatttccgagtttgaagacgaggaaatcgaagtgggggaccagatcgaggtccttctggaacgcctcgaaaacgacgaaggcatcgtcgtcctttccaaggaaaaggccgcccataagcagaactgggataagatcgtgggcgtgtaccgcgatggcggcctggtcaagggtaaagtgaagagcgtcgtcaagggtggcctcatggtcaacgttggcgtggaagccttccttcccggttcccaggtggatatcattcccccgcgcgacctgaacgaatacgtgggcaaggtttacgaattcaagatcgtcaaggtgaacgacgaccgcaagaacatcgtcctttcccgccgcgaagtgatcgaagccgaacgcgccgaccagcgccagcgcttccttgaaaccgtcaaggaaggcgacaaggtggaaggcctcgtgaagaacatcacggacttcggcgcctttgtcgacctccgcggcatggacggcctgcttcatatcacggatatgagctggggccgcgtgaaccacccgagcgaaatgctccacatcggccagtccctggaagtcgtgattctggaagtggaccgcgaaaaggaacgcgtttccctgggtctgaagcagatgacggacaatccctgggcggacatcgaacgcaagtacccgatcaattcccatgtcaagggccgcgtgaccaagcttctgccttacggcgccttcgtggagctggaaaagggcgtggaaggcctggtgcacgtttccgaactgtcctgggtcaagagaatcacccgtccgagcgacgtgctgaagctggaccaggaaatcgaagccgtggtgctttccatttccgtgaaggaacagaaaatctccctcggcgttcgccagctggaagacaatccctgggcggatatcgaatcccgcttcccgatcggcaccgttatcaagggccaggtccgcaaccttactccctacggcgcctttgtgggcctggaagaaggcatcgacggcatgatccacgtgtccgacatgagctggacccgcaagatcaaccacccctccgaagtcctcaagaagggcgacgaagtggaagccatcgttctggaaatcaagaaggaagaccagcgtgtctcccttggcatcaagcagcttgagtccgatccgtgggaatccatcaacgaccgcttcaaggtgggtgacatggtgaccggccaggtggccaagatcgccagcttcggcgcctttgtgaacctgaacggggacatcgacggcctgattcacatctcccagcttagcgaagaccacgtggaacgcgtgaaggacgtgatcaaggtgggtgatgaaatcaccgcccgcgtgatcaaggtggacagcatcgaacgccgtatcggcctttccatcaaggccgtcaattacgacaccgaacagctccgccgtgaaaccgcctcctttgaagctctccgcccgagcagcgacatggtgggcctggaacacgccttcaacctggctacccgtgaaaacgaagaatggagcccttctgaagagaagtaagcttatctacgtaattcactgattgatttaaccgccgcgaatagtgatattcgcggcggttttttttctcattccaaattaggatggaaaaagtcttgagttagttccgcctaagggattaactgttctcttataccatgttggagctgaccaagagcaatgaggattatctggaggccatcgggctgctgtctgaaaagagcggaacggcccaggtgcgggatattgcagagatgcttaaggtgaaaatgccgtccgtgacgtctgccgtgaagcagctggcggacatggggctggtggagtatacgcagtacgctccggtcaagctgacgccccagggccgcagaatcgcgggaaaaatcattgtcagccacggtattttgtttgatttcctgagggaggaactggctcttccggaagaacgcgccaatgaggttgcctgccagattgagcatatcatgacttttgaggagattgaaaagctcaagtcctgccggatacggccttttgaggggtccggggaagattctgccggataggttttagttccggtggcgggcgggatttggaccaagcctccgttgcgctttgggtgccggctatccgggaaggccgggatacctccatacacggccctgtgattcgttcaggctgtgggatatgtcctttcccctgctttttccgatagccgcactgccgggaacaaggaccttccgtcccttgccagaatcttatggagtatctccatgagaaattttccttgaaaaaagaatgaccgggagaatcggtattttgcccttttccgttcaggtgattcgtgataggttcccgcgcatggatccccatatcgctgcagatctctcggcgctcgacacggctgttttgcacagccgtctttccgagctcgggagctatctttgacctggacggcattcaacaacgagtggccgagttggacgaacgcatgagcgctccggatttctgggatgaccagaatgccgcgcgggcgctgatggcggaagtgaatcccctgaaacacaggatggaggcgttttctgcattgaaatcccgtctggaggatattgacgctaccattgaattggcccaggaggcggatgacgacgacctgggccgggaggccgtggaggagtttgccaaatggcagaagtccctggcggattttgagctgctgaccttgttgaacggcccgcaggaccaggcttcctgttacgtgaccattcacgccggggcaggcggcacggaagcctgtgactgggcgtccatgctgatgcgcatgtacatccgctggtgtgagcgccgcggcttttccgtgacttatctggaaagcacggacggggatgacgccggcatccgttccgtgaccttgaaggtggatggagagtatgcttacggttatttgaagaatgaacgcggcatccaccgcctggtgcgcatttctccctttgattccgccggtaagcggcacacttccttcgcctccctggacgctacgccggaggtttccgattccatcagtattgagattctggacaaggatttgaaggtggacacctaccgttccggcggcaagggcggccagaatgtgaacaaggtggaaaccgccgtgcgcatcacgcacattccctccggagtgatcgtagcctgccagaacgaacgcagccagcttcgcaacaaggaggaggccatgaacatgctgcgcgccaagctgtaccagattgaggaagacaagaagcaggcggaagccgaccgccagtacagtgaaaagggggacatcggctggggcaaccagatccgttcctacgtcttccagccttaccagatggtgaaggatttgcgcacgggcgtggagtccggcaacattcaggacgtaatggacggcaacctggaccccttcattgaggccatgctgcgcggccacaagcgcgaacgctgacgttttccttcccttcttatggccgctggactgattattgacgttctctccctgttcccggagatggtggaagcccccctgggcggcagcatcctggggaaggcccgtgaaaagggtctggtggaggtgcgctgccataacatccgtgactggacggtggacaagcaccgcaagacggacgactacctctgcgggggcggccagggcatgctgctgaaaccggaacccatttttgccgccgtggaggaactccgcaggccggaaacgcgcgtggtgctgatgaccccgcagggccgcaccttcaatcagtccctggccggggagctggccgcatccggcggccacctcatcattctctgcgggcattatgagggggtggaccaccgcgtggtggaagagctggtggatgtggagctgtccatcggggattatattctcacgaacggggcgattgccgccgtggtggtgattgatgccgtggcgcgcctgattcccggtgtgctgggggatgaacgctcttccgtggaggagtctttttccaacggccttctggaggcgcccgcctataccaagccgaacgtgttccgcgggctggccgtcccggacatcctgctgggcggcaatcatcccgccattgaaaagtggaagcacgggaaatctctggagcgtacgcggctgaaccgtccggatttatggagggagtggctgagaacgcatccggaggatgccgtggagtgagatatttggctgccgcgtcaaatttctcttgccaagtccggggccttccgttataagacctcgcctgccaccgtgagggtggtgtgaagcacctttctgaaccttttacaaaacacaagatcatgtccaagcattccagcctcaaagcaaccggtaccgtaggcggcaagcgttccgtcctgaagcgttttgaacgcgtcaagcttctcaaggaacgcggcgaatggaagaagggccaaagccccctcggcctgccgaagaccaagcatgaagcttaagcctgcttttaccccctccggagagtttcccggcggagtcatgcacggcaagtcattttcctaatacaggaagcctctcggatgtctatgaaccgagaggcttttttcttccggcaaagaaggccatccctctttttggggcgcgcgaattgccgtaatacaaacaatacaaaaccatccgctgagatagcggacattataccaatatgagtgaagaacaacatggctccgaagaaaacggaggtatccgcattaataaattccttgcatcctgcggcattgattcccgccgggtggctgacagactgattgaggaaggacgcgtggaagtgaacgggaaggttattgatacgcccggaatgagggtgacggagaaggatttcgtgaaggtggacggccgtcacatgactcccatggaggaggttgtggtgctgctgaacaagccgcgcgggtacgtatgcagccgtgaagcccagggggccataggcactgtttacgacctgctgccgccgcgcctgcgccatctgaattacgtgggacggctggatgcggattccgaaggcctcctgatcatgacgaacaaaggggagctgacccagaccctttcccaccccaccggcgggattgaaaaggaatactgggtgacggtagatcagaattttgacaattccgtgctgatgcagtttttgcgcggagtccgcattccggaaggcaatgccaaggccaagtacgtctgccgcgcttccgcgcgccgcgcctgcattgttctggaacaggggttgaaacgccaggtgcgccagatgttccagtgcctgggcctccgtgtccgcaagctggtgcgcgtgcgcatcggctccctgtgggggggcgatctggaacccggaagctggagattcctggatgatgcggacgtagccctgctgctgaagaatcctccccgccagcgcaagtacctgggcgcttcccagcttgtcgccgggacttccgccaagggcgaacagagcgggaaagacaatgattccgatgaaggttatgtatttaatccggaagattttgaggctggggattcttatgaacctactccggaaatgaaaacccgctttgcggatacggaagacgaggatgaaatcaaggacggggaagaccttcgggatgattccggattccgttcccgcgaacgccgggaagatggtttccgtggacgccgcgaaggcggtttcggtggcaatcgccgtgagggaggattccagcgtcgtgaaggaggtttcagaggagaccgccgcgaaggaggattccagcgccgtgaaggcggcttcggaggagaccgacgcgagggaggtttccaacgccgtgaaggaggatttggcggagaccgccgcgagggaggcttccagcgccgtgaaggcggctttggcggagaccgccgtgaaggaggattccagcgccgtgaaggcggatttggtggagaccgtcgtgaaggaggattcaaacgccgcgaaggcggtttcggaggagaccgccgcgagggaggcttccagcgtcgtgaaggcggctttggcggagaccgccgcgaaggaggcttccaacgtcgcgaaggcggctttggcggagaccgccgtgaaggaggttttcagcgtcgagagggaggatttggtggagaccgccgcgaaggaggcttccagcgccgtgaaggcggatttggtggagaccgtcgtgaaggaggattcaaacgccgcgaaggcggtttcggaggagatcgccgcgagggaggcttccagcgtcgtgaaggcggttttcgcaaaccgggctttggcggcagatcttccggtggtttctcccgcggaaacaggggccgttaatgattgacttgttccggtatgaagaagcagtgcaaatggtggctccttgccggattgtgtgggctgtgcctcgttcagcctccgcttcatgcgtctcaggatgctccctccccggctcctgccggtgagggggattttgggacgtacctgtccagtcttcaggagaaagcccataacggggataaagctgccgcccgggagctggccgtgcattatgatgtggcgggaaatgcctcggagacgtccaaatggatgtctgaatatgtttccctggcggagaaggaggccaatggcggggacgtggattccatgctggatttgggcaagctgttttataccggaagccgcttgtaccccaagaatcttgaaaaggcccggtactggtttgcccgcgccgctgacagcgggaatgccgcggcccagtaccaggtggctgtaatggcctccaagggaaccggcggtccgaaggatgaggaaacggcgtcccgctattatgaaaaagccctccaaacatggaggaaagaggcggacgccggcgattccaaggcggcgttgtgggcggcccttgtttatgagcggaagctggttccggacagctctccggaaaagtcggttccgtacctccttcatgctgcggaaagcggcaacctgacggcgcaggggcttctggcattcaagtaccgggatggcctgggcgttccgcaggatgcggccaaggccgtggaatggtttgaaaaggcggccggacggaaggatctgggcgccgtcatggaactgggcatgatgtaccgggacggcaagtatatgccccctgaccgggaaaaagccctcaactggtttgaaaaaggcgcggaatggaaggatccgtacagcatggctgccctggcggacatgctgatggaaggctctccttccggagaacaggcggcgcgtgcgctggccctgtaccgtgaagccgccgccatcggttacccccctgccgccctgaaggccgcggaattgctccagaacgggaaaggcggggaactggatgcagatgaagcctacaggctgctgcggcgcgcggcagacgcaacgggggaccccaaggccatgtacatgctggcccaggtgtattatacgcggggtgatgatgcgcagggggattccctgatgaaagcatccgcccaggcggcttatctgccggccatgaaccgcatggcgcgcctccatcttctgccgggcagcaccctgtcctggaatccggtgctgtcctattattattggaaccaggccggagaattgggggatgaaggggcggcttccgccgcgttctggctgctgtggggcagcatggctgcgctttccctggtgattttcctggtcgtttggcgtttccaccgttttgccgtcagaaggcttgcggagcagcaaaaacaggaacaggaatcctctgatgacgcatgaagcgtattatggagtatccgtcatgaaaaaaatctgttaaaaacaccgtagcactccatgatgaacacgttagctatttttggtctgggaacgccggagattatcgccattctggtgatcgttttcctgctgttcggcgctaagaaactcccggaattcgcccgcggcctgggcaagagcctgggagagttcaagaaggccaagtccgagtttgaagaagagctgttgaagacggagaaggaaaccatgagcgatgttcccgcctccaagccggaatcccgcccctctcccgagctttcccagcccattgacgtggaagcggagaagccggcggaaaccaaaaaggagagtaagtaggttttcatctgataaaaaacttgagcaggcggggatttccccgccttttttgttaactttttcctgttaccttcaattggtagcagacagccttcttttccgatattccgtggttgattccatggaatattctttgtcgtagattccacttgatcaaattcttgatgaatcatacgcgggatttatttattttactgataggcgaaagagaagggggatggatttttctgctggaacgtgaaccatgaagcggaataagaaaagaattcctcttataaaatgagattgcgaaaataacgcaatgcgaattttattctcctgccattgcaggcatgaattacccggctactctttccgttgattcttgaaaaagaagtatgctacagagaatacttattgagaatacgcatactatcgtgatgcaagtctcaatattttgtttatcaatatctaacaaaacaacatcgatgaacgaacaaacattcgataacagcagggataatggaaattccatatcccgatccgattcctccaacatgattcttgctgaggaatatcctggttttaaatattacattcccgctacccgtacgcgcactggtgaacctcaaaatattcatgaatccattaaagagggccctccttctgaaggtttccacaaggatttttactggatagttaaagttggtgatccatcaggggagaccagggaacccgttcaagttacagcagacttgagcgtcgacgatttaggcgaattttccatgggtcctttgaaaatcagcttgcctgagcaggggccgaatggggggagctccggacagagtgattctgcttccgggaaacttcttcccgggttttattgcgctacgttaagttatgataatattgactataaaaagaacgctaacaaagccttcctggaatttagcctgaatgccagtccgggcaaagctgttccggaagacaatgaagacaatgccggagattgtgagcgggatgactgcgattgccagaaagggtctcagaacgaaaatacgacgcagccgggcggagaggaaggggcccctgcttctcggaaaatccgctcggcagaatgggccagttcttccggcggtaaaaatatcacagctaccattagcaagaacaacatgctttggcaggcgaatttcggtaccttccgaggcatgggaggcgtaccgggaggcatgcttgaaattacggccaaaaatttttcagaaacggcttggtcaatccactctcttgcctacaatcatccgatggcaagtcgtctggagaaaccatccggctccagctatatcggccagcccaacaccatggtgaaagttgtctccggaacaagcaaacatcattacctcatcggaggagacggcaattccatcttcggcgccggagtttctaccggtacaaccacctccgcccggttccaatacggaagttcgggagaacccccccacatagaatttaaaacacataccaaaagttccactatttattcaactgtttcaggaatgccttccagttataacagttggtccggtaaacagatttcttcttccgaatttgcccgttaccttgatattgtaaaagctgaagacgggagtctgcgtcagatatggaacttgtgggatggggtggcaaatatcgaaaatattagtgaaaatggttactccatcgccctatatcttccaaaccaggtaggagctaaagacaattccaccggtttgtatcagctcacaggggaacctttcaaatcctttaatattggccccaacgaagaacgtgaccacatcattgttacagagcgggcggctggtcgtcccccttatgtggtatcctggtggcagactggtggtgcctggagcatgtcaaaaggcaccggagaagacgagattgtcacactggtagagcgagaagagcttggaggcaaccgctatcggcttactgcaaaagtcaagagaggaatggagggagaggtggtttcatgtacttcagaaactttctctaagacggatgaaggaacgcagagaaatgacaaaactatggcttacggcagttccatctcccggaagactacctattcctatgacgatgccgggcgcggcaatgtagtggataagaacgcctccacaaaagacaatatctggtctagcggttatgatacgcacagccgccccactgtctcgtatgagccgtgggccggaggcactcgcaaggctatctatacgtattataaggatggggatttctatgattcggacattgaccatcaacgcatcgcccttgttaaagaaggaaatgctacccagtaccggcgtatcaattacaaatactccacagtcaatcatgtgcgccgcgtagaaaaacggaccacggctcttgggtctgataaaacacagtttgaggcgacagaaacctggctgggcaccgctcccaatccccatgcccaaggacgcattaaattccaccgggatatcaatggagtacagacagcttatacctatgagcccaataactcttacggatctctttacaaagttacgaaagaaacgcaagtatcggggaaagctgttcatggtcaaagcacgcgtcaaattcgttatgtctctgctcagggaaatgacatgcggatagaagattacgttctgctttctaacggtacttggaagctggttgaagccatggattacgaatacgactgtgaaaaccgctggattaaacgcacgcgcgccaatggccgtattacagaacgtgaaatgatgtgctgcggtcctctgtgggaacgggatgaagacggtattctcactacctattcctacaatacggcccggcagcttgtagaagttatccgctccgcaacagaaactactccggaaatgatcacctcctataccagggatgcgatggaccgtattcttgaaactcgtgtagacatcggtccaatgacaaccatcaccaggacgagctatgatttgctgggacgtcgtgtttcctacacggataaactggggcgcgtaacaacctactcttatagtgaagacggattgaccacaactgaaacaactcccacaggagctactcttatcacacggaagcacgcggacggcactctcctggagcaatcaggaacaggacagcgacacttgatttatatggtggaggctctcaagaacggagtccgcaccaccatttcaaccccttccccggaaggaaaggccgacatcgtactttcccgagagaccgtggacggtttcggacagacggtgaagaaagaacttcccaatacggaagagggatggattgttaccgactatgcctacaatgaaaaggggcaaaaaacacaggagcagacggttggtttggcccccattctttatgactatgatacgatgggaaacctcatcagagaaactgtcaagctggatgattcccctacaaaactcaactcccgcattacggaatgggctgtctcttttgaggatggatcagatggagtctatctgaaagagacctctaccatttatacgccggaagggtcccctgtcaggacttcggaaagcagtctcatctcatcaattcatgcctccctggccggaaaaaccgtgattagggacacacggggtaatgaaggcattacatggacggaatattcaacatccgccaaacgaattatcaaacggcaaactccagcttccaataccgtggcggcagatgtcttgatagatgacttcctgatttcaggaatggatctggcaggcgtcatgaccacccatgctcgcatttatacggaacatggtttaacactgattgatacggatgcccgcggcaatactaccattgtggagcaggatgtctccgggcgttccgtcaaggtaacgaactccatgggtggtgttaccacgacatcctatgatccagccacaggaaaaccctcccttgtgatggatgccttgggaaacacggtctgcttctcctatgactgccgaggacgtaaaattgctgaatacggtacaggtgtccagccagccctttatgcctatgatgacgcggacaacgtggtttccctgaccactttccgggctggggaagaggccattgtttccgatcccacggaacgtacggatggcgatacgactacttggcgctatgacgcgtccaccggtttgcttctcagtaagacctatgctgatggaacttccgccaactatgagtatgactccatgaaccggctggagaggagcattaatccccgttccctcgcagcaataaggacttatgctccgctcaccggggaacttctctctgtcatctgtgacgattcctctaccacgcaaacgcctgcggtcacttattcttacaactacctcggcatgcctgtttcgatttcggacggcaccgggacacgggaatttatatacaaccagtacaatgaactggaggcggaaaagatgcaaggacttgtctccagtgtcctttctaatactcgcgatcctctggggcgtataacaggctacagccttctttgcggggaggaaaccgtacaggccgtttcctatggatatgataccaagggaaggctgggtaatgtctccatggatggtctggaagctccctttaattacggttacaatgttaaccatgggctattggagacgctttcctaccctaataccctcaaaagatggtatacgcgggaagaaaagaggaatttgctcgtcaaagtagattatctccgtcctggagggcagaattatcccgcaaaggttgattatacctatgatatcctgggacgtcccatgacaaaaatggattacttcaacactcctaatcccgatttgatacataattatacgtataatggacggggagagcttgttgccgacgcgatgagtcggggtggaacatacagctatgtttatgacaacatgggcaaccggataactggccgggaaggaaccgcagattcttctgtgtatgccagcaacgaacttaatcagtatgtatctattattgaaggaacgcaaactcctttcctgccggaatatgatttggaaggtaaccagacaaaggtgaaaacggttaccggggaatggagcgttacttacaacgtgttcaaccaggccattgaatttgtacagggtgagacgcgcattgaatgtttatacgactacctgcaccggcgtatggaaaaatccgtatacaacggagaaaatctcgtttcccggaaacgtttcatttacaaggactacctgcaaatcgcagaattggatgccgcacacgcggatgaaacggttttacccattttgaagaaaacctacctgtgggatcctgtagagaccacagctacgcgtattctcgccatgcggaactatgatgaaacaggcggtaatccggaaaacctgtacttcacgcacgactggatgaagaatgcgattgctctcttcggttccaaggccgggcgccgtgccttgtatgaatacgctccctacggagccgttatcaaagctgaaggcgacatggctctggtcaatcccttccgtttctcgtcggaatatcatgacgatgaattggggatggtttattacaactaccgctatctcaaccctctggacggtcgttggattaaccgggattttgtttttcaatccaatctttattgctttgtgaataattcaacaatatttaattatgattttatcggattatataaggaatctacccagaattggttgaaggaacactgtaaggatatactgtattacgctggcgagtatggagtcgatccttatgccttggcaatgccaatggcggaagaatatgatgattatttaagcgggcgaaaactggtaactgatttcatacaggataagcttgagggcttgggaattatgagtaatatgtttatctacaagggagatataggacccgttaatattcatgtaaatacggcggcaagatatgccagccagagttcattgcggaataacaagcatagttctggagtgcgccgagctatacaaccaggagacgtgaagcaacgaattttgacagatgaaggagctatagaattttcagctatcatcttgagtcatgtcatagatgatttggctcatgcggaaaatggtgttgtttttccacggaatgaggataaatctttagaaaattacagcgcgatcagattcatgcaaacgcttttcgtcaaggagttgatgattatctaaaaaaggtaagagcacaaaagcagaaggatccagattatgtcacagatcctggggtgaatgacgaagatttaagagaaagaggcaaccagatcaaaaatgccctttgtgattgtttaaaagcatcctattaaaaatgaagataaaatcatactatcctgtactagcatcatggatcattacattgcttttgtgcggaacgagcgtgggagtccgtttttatggttttccaaaatggatggatttgagcaacttgactgaattggccatgatgttttttgggttgataatggttggaggtcctattcttagcttgttgtggggggtatgtggacttattgaagataaaaagaagatggattttattatagctgtggctttatctattttatggtttcttccatttttgattgtctttgctcttggactttcatgaggagccaatagcattgttgacaggctgttctctcagaattgagagaacagctttttgcttttcccagtctggggttcccctgtgcggtgtaagaatgttttaggaaaacgtgcagcgtgggcatgaagaattgtgatgggtgagagccaatgccgggaacttgaaattgtgagcacggacacatgaaattcatcatcccggaaggcactgatttcttgcgttggccgggggcttgttgtacacatgtattaatgaaaattcatttttgcggcgcggcgggtacgacgacgggatcccagcatttgctggaggtgaacgggagcaggattcttctggattgcggcatgtatcaggggcggcgtgaggaggcctggcacatcaacaaggattttccctatttttctccggtggaggtggatgcagtggttctttcccacgcgcacatcgaccattccggcaatcttcccaatttggtgaagcaggggtttcaggggaatatttacagtacgtttgcgacccgggacctctgccagctcatgctggcggacgctgctcgcatccaggagcacgattgcgcgttcatcaataagatgaacaagcgccggggcattcatcagccggacgtttaccccacttattccgagcaggacgcggaacggtgcatgcgccagttcgtgaatatcgggtatgatcggcccattcccgtcgttccgggcgtgacgctcacgttttatgatgcgggccatatcctgggggccgcccaggtgtgcctggatattgaggaccgggaagacggacggaagaaacgcttcctgttttccggggacgtggggcgtggggataatgaacttctccgtgaccccgtgcctgttccggatgtggacattttgctgatggagagcacctatggcggacgtttccatgaggctccctcccgtgatgacgagaccttctgccgggccatcaaggaggctctggcgctgggcggccgcgtttatattccggcttttgccgtggaacgcacccagcagcttctttacctgctgaacagggcttatcatgaaggctcgctgcctttgctgcccgtgtatgtggacagccccatggccgtgggcgccacggagatattccgcattcatccggagtgcttcaacaaggaggtgtacgatttcctgttccgggaaaaggatccgttctgttttgaacagctgcggcttatccgttccgtaggggaatcccaggagctgaacaagatgaacgggcaggctatcattatttccgcctctggcatgtgtgaagccgggcgcatcctccaccacttggcaaacaacatcggcaacccgaagaatacggtcctttttgtgggctattgtgcggaacatacgctgggccgcaagatcatggacgggtggaaggaggttcccatcctgggcaagcagtacaccgtccgggccaggatacgggagatggattccttctccgggcatgcggaccatggagagttgctggagtattttgacaagaccggtgggcccaaaaggaacatcattctggcgcacggggaggagaaagcttccctggctctggcggaggcgctcagggagcggcagcccaatcccgtttccatcgcgcaactgggaagcgccatggtgctctgacgttccagcgtgcctggcggctttccgctgcgcctgcacgcattccggttcctctttcagggtacgccatttttgcggcggatgcgcccggcgtgttccaatcaagtcatgacggcaggatggctgtgctggccgcttgacccggtgtgtttacggggctagcgtgcaggtatgtcttccttgtttattgaatatcccaagtgcacgacttgccagaaagccaaaaaatggcttgatgaacagggcgtttcctatgaggaccgccacattgtggagcagaaccccacggaggaggagctccggacctggattgaagagagcggcttgccgtccaagaggtttttcaataccagcggcctgctgtacaagagcatgaatttgaaagacaggcttcccggcatgagccttgaggaccaggtggccctgctggctaccaacggcatgctggtcaaacgccccattttaatcaccaacgggaggatatgcgtcggcttcaaggctgacgaatggaaagccgcccttcatccctgattcccgccatgcccctgattacccgcaccaagcaaggcgcagccaatttcggcccctgggagaacgtcgtcagggtgctgattctggtatggttcatgctgtacacgctgaatgccattccggacgttcacccgctggtaggccgcattgcggccaaggtgaattactggatcagctatttctttgtgtttgagtacatcctgcgggtgctgtgcgccaagccgcggaaggcttatatcttcagcggcatgggcattctggatttcatcgtctgcgtgccgttcctgggcatgtttttcgggttggactggcagattctttattccctgcggattgtccgcgtgctggccatcttcaagctggcccggtttaatgaaactgcggccagttttaaaaaggccttttacctgatccgggatgagtttttcctgttcttttccgtgattcttttcatgctgtacgtcacgtccctgggcatttacattgcggagcatgaagcccagccggagaagttccgctccttttttgacgctctctggtttgccgtggagaccctgagcacggtggggtacggcgatctggtgcctattacgcccatggggcgcatttttaccggggtgatcatgttcattgccgtatccatcatcgccatttccacgggtctcatcacgtccgccttttcccgcgtgtggcagcaggaaaacgtttttgcgcaccgccgcaagcggcccgcggacaaggccgcggctgacgccggcggcgaagaaggggaggccaaatagccccccggtcttttttgaggactgcccaactccggtccatggatttttgaaacaagcttgaacaggaacggccgcctttccacggggaagggcggccgttgcgtaaaagcgggaaaagagttttccttagctgttgtacatttccgtgtagtactggtccgccatgcggtcggagtcgaattcggggtagatgtccgtcatcgcattgaagacgatgtccatccacttgtcgttgtgatcgtagtagagcggcaggatattgtcgtccaggatgttgtagaagttgtcgcggtcggagcggtcgcgggcttccggggagaggtgcggagccgcttccgggatgacgaagcagttttccccgtccttggcgaattcgcagatccagccgtcattggtggagacggagatggagccgttcatggcggcggacatgccggaggtgccggaggcctcccgggtgactacggggttgttcagccacacgtcggagccgttcttcaggtagcggctcaggcccagttcatagccggtaagcacggcggaacgtgggtatttggccgtcatgtcgttcaggcggttgaagatttcaatggcgccgtggtccatcgggtagggcttgcctgcccagatgaattgcaccggatagttggtgcgctggagcatgcgttcaaacatggtgggattgccggtgaccaggtccggacgcttgtaggccgcaaagcggcgcgcccatacgatggtgaggcagttcgggtcaaaaacgcggcctgtctgttcccccaccatgcggaagagggcttttttcagggcgcgcttgcggcggatgaaggcctccttgttgcgggcctggaaggcttccgccagttccgggtcctgccagtatttctggttctgggcgttcgtgatgtggatgatggggcacacgccttcatagtccttccacatctggcgggaaacttcgccgtggagcttggagacgccgttggcgatgtgggagaggcgcagggcggccagcgtgtagttgaacgtgttgtccgtcaggcctacggcggcgcgcacctgttccatggaaagcccgtcgaagaaggagaatgtgttcatggtgttcacgtccatcttttcattgccggcttcctccggagtgtgggtggtgaagacgaagcgcttgcgcacttcctccacgctgccggtcttggcaagcacgtggaaggcggcggccaggccgtgggcttcgttcaggtggtagatttccggttcaatgcccagctcgtcaaagaggcgggcgccgcccttgccgagcagcacgtactgggcgatgcgggtgaagccgttggcgtcgtacaggcggcgggagatgttgcggctttcctcgtcgttttcctccaggtccgtggaaaggaagaacatgggggcggtgccgaaggtttccggattcaggaagtaggccttcacccagacgggggcgccgcagacgtggatgaggaatttgatgttgtggtcttccaggaacgggtagttcttgcgcatgtattgcgtggccatggagccgtcttcagcccggatctggttgtagtagccgtagctccacaggatgccgacacctacgaggttctggcgcaggtcatgggcgctgcgcatatgggagccggacaggtagcccaggccgccggagtagattttgaatgaattgtcaatggcgtattccatggagaagtacgctacgctttttccgtatttggggtcgatttcatacggatgttcgaaaatggtgggtaaaaatgatttcgccatggttctgtaagtagagtaaagcgttcaacaggtgaaccgtatgccttggtatcatgattcgtccatattggaaagggcaaattgcgtgtgtgtctgaattgttgattgaacaggaatgcctttccggagtttgctttccggggttttaccgggccggggagaaggggatgcggcggtgccccagacctccgttccggaagcggttttccggtgcgccggaaacgaattttgggcttgccgccgcaggggaaaaagagcatgaatggggggcatgaaagctcttgtaaaaacgcaggcaggccccggtttggaactgatggatgtccccatgccggaagtcggcccgaacgatgtcctgattaaaattcataaaacagccatttgcggcacggaccttcatatctggaactgggacaagtgggcccagcagaccattcccgtggggatgcacgtgggccatgagttctgcggcgtgattgaatccgtgggttcctccgtaacggaatacaagcccggggaaatcgtttccggggaaggccacatcgtctgcggccactgccgcagctgccgttccggccggaagcacctgtgcccgaacacgaagggcgtgggcgtgaacaggcccggctgctttgcggagtatctttccattccccaggacaacgtggtgcgcatccacaagagcattccgatggaaatcgcctccatcttcgaccctctgggcaacgccgtccatacggccttgtcctgggacatggtgggggaagacgtcctgattacgggcgcgggagtcatcggctgcatggccgccgccgtctgcaagaaggccggagccaagacggtggttatcacggacatcaatgatttccgcctgagcctggccaagacgctgggcgcggactgtaccgtgaacgtgacccgtgaaaaactggaggacgtgatgaaggagctggaaatgacggaagggtttgacgtgtgcctggaaatgagcggcgccccgtcctgcctgaaagacatcatcgacaattcccggaacggagccaacatttccctgctgggcatccagccggacggctccagcatcgagtggaacaagtttatctggaaagggctgaagatgaagggcatttatggccgtgaaatttttgaaacctggcacaagatggattccatgatccgcagcggcctgaatatagcgcccatcattacgcaccgcctgccctacacggaattccgggaaggctttgaggccatgaattccggcaagtccggcaaggtggttctggactggattgtctgatttatccgcttttttaccgtgtaacgaatgccccggcttccagatggaacgccggggcattttttaagaaggcacaggatagggggtgaggatttgctcccggagcgtcaagcggtttttctgggcgtgggtggcgtttgggcatcccgggcccgggcgcggcgttcctccttcatgcggcgggcgtagctgtcgtcgtcttcctcaaaggcgtccggatgggtcagccggagcctccgcaccaccttgtcatggtcctccggggaaaccaggtccgtgaacaggcctccgtgaagatggtccacctcgtgctgcaggcagcgcgccaggagcccgttgcatttgatggtcacggtgcgtccgtccaccagggtcaggatggccttcacgcaggagcggcgcaggacgtccgcatacaccttggtgatgctcaggcagccttcccggtacggcacattcctgccgaaggggtgcaggacgggattgatgaaattcaagggcatgatttgcgccagcgtggccgggcgtccgtccacttccagccatgtagtagtggcgtccgtgggcggaatattgatggtgaccatctgaatggcccttcccacctgcggagcggccaggcctatgcccccctgggccagggtttcctgcatgtcgtccaggaaggaaagaaggtctttgttgatatgaaccacggggttgcattcctccctcaaaaggggatgtccgtattgaagaatgtcaagaatcacggcggataggatggagttggtaataaggtgtgacctccgggttcgggagagtgttcatgatatttaaaagaatatttccgcacatcaagaatgcgggaatgttttttccggatgaaatgaaaaggccttgaactttggggacgctttcttacggtaaccatgttgccacgatgcgggccgggctccagagcctccctcatcaacgccgctttctcatgaaactcagttcccgtttttccctgttcctgaatttgccgctgttgggaggcgcgtgtttgctggcgctgtgttcctgcggggacaaggaggaaggggaaagggctgcggaggaaaaggaggctgaaaagctttccccggtagaatcctatgaagaactgctttccctgcgcctgaaggatgtggagcagatgacggatctggtcgcttccatccaggaccgggctgcgggagaggccgtgatggtggaactggggcggttgacggacaggctgaagctttacgacatgaactgcgggcggctgatgattctgaatccgcgcgtgcatgaagagtcccgggaggttcacccctccttccattccattctccgggagcgcgtggacaaggcccgcgaccggatgatgcaggcgatgctgaagcttcatgaactcaagtattacgattccgccgtcatcagggatgatctggaaaagtacggtctcagcctgacggacgaacggatggcccagtatttgaacgacaggatactgccgttcctgaaagcgtatctggagcagtacgccaccatggtggacatgctggaggggattgataacaaggtggctgcggaggcttatgccatgtccgtagcccttcaggggcgcatggtcagggaacagatggacaatatcacccggctggagcaggagtacggagaatggctccccagttttgaacggcactgccacgacgggttggagaagatgaggagaagggcggacgagagccgcaaacgcgctttccgggcgctcctgaagctggtgacggccagaatgtatgattctccgtccatgcagaaagcagtggtggggcttgagatggaacagcccaggctggtggattttcaggaattctgggctgatcccatcatgaccatggaggagttctgcctgtgtttggaaagaatccagcatctcctgcgcggcattaaggataccggaacggcggaccagcgcgccatggagctggtggaagtggtggccaggctgaaaaggctgcgctacgtcgtggatgattttcagaaatccggccgcatgaaccaggtaaaaaccagggatctggaacgcatcagccgccgtgcggaggaagcggaaatggccgtttccagtaccatggcccatcttatcgtggagacggacgttgtgacccgttccccccttctttcccgcgccatgggcttttaccgctacgtgatgtacacgcactgagggctgcatgccggaaagcgcctattgacatccggcgtcggaacgggacaatctgcccatgatggatgttgatttttccggaagtgccgtggttgtgacgggcggagccggcggcattggccgcgccattgcggaggcttgcgccgcagcaggcgcacgcgtggcggtgctggatgtgaagcatgaggaaacggcctccctgctggaagaattgccgggagaaggccatctctgcgtgacgggtgatgcgggtgtggaagaggacgtgcgtttttttgcggaaaaagtgttggagcacttcggccgggtggatgtcctggtaaacaatgcgtgcatcacccgccacggcattctttccggctgctcttatgaggactttaatgaagttctgcgcgtgggcgttgctgccccctacctgctcagccttttgttccgtgatcatttttcccgcggggcttccatcgtgaacatcgcctccacccgcgcttccatgtcccagaaggatacggaaagctacagcgcggccaagggagccctcatctccctgacccacgctcttgccatgagcctcgcgcccctcggcgtccgggtgaacagcatcagccccggctggattgacacgggggcctttggagccttgtccccggaggacggcctccagcatccttccgggcgcgttggaacgccggaggatatcgttcaggctgtgttcttcctctgccgctccggcttcgtcaatgcggaaaacctggtcattgacggcggcatgacccggatgatggtgtatcacggggatgaaggctggacgttccgtccggagccgccggacacggtcccctcatgacggcagccggcggctgcggcaggtattcggagtttcccgggtcatggaatacgtacacgtgcgggaaaaacattgcccgcatgcggatgaagcaagggcgggcacgaacgcggaggcgagtttttgtttggaacggcttggttcgtcattccccggagcacaggttatacatgcccaggcagggggtaacgacaatgccgaccggaataagaaggatattggcaatcacggtaccgggggcgtcaatcacgcagctctgtgctcccgccagaattctccggcctgtggagggagcgctgatgatctttacggctgctacggtaggagaagcgttttctttcctgctcaagttcaggtggggaagggtaatttgatgcgctccatacagggaaaaccggggaggaacggtgaaattctcttcaagtaccatgctcaggaggtctttgtattctatgggatcgggaaggtctttcttgttaagctgcaaaaagacggtcttttccgttcccggaatatcctccatttgtgaaatgaagtctgactgggccatgggcggtccgatgaccggagtttccttgcgctggtcgcattgaacggctttgatgtaaacgaagccgtttttcacataggcgcggtcatccagttcccagttgcggtaaacggttccggcgttcagcgtctgggcggccgtattgacggaaatgcaggcgcacggcagcaggaatgccgccggcagtaggaggaaacgtttcatggggtactgccgtggatagcagtatactgactgacagtcaatataaaataagaagagccgctcctttccggagcggctccaatattcccttcacgggagcagaatgataaaagtcagcgaatggtgacgcgggggtcgttcgccagaacctcggccagttcgtcccagccgtcttccgtctggagctggaacatctggaggtaaacggacgctacgccggcagggtatttttcaaacaattcgtccacggccttggcgagtttttccttgtccagcgtttccggcagttcgttcacaatgccgttgccgtcatgggggatgtccagcgtattcaggaaagtaatcagcatgtcctgatgcttgcgcagaagccagacctggagcaggtggtccccgatttcattgctgggtttccacgccagcattttctggatgaaggagaattgctcctgaaggggcttgcgctggatgaattccgggcgcaattttttcagggcgccgagttcacgcacggcggcgcggtaaatggcgcgttcctggttgcgcatccagtccagaatgttgctgatcgtttcttcgtccgcctgctggaaaatgtaatatgccttcatgataagtagggaaagaaaagctctttgaggacatgaactccaccatgtttccccctcctatgcaagctcttctactgtcacctgccgtacttggcttctattccggattcaaggcgtaaaaaaacggtcttattgcaaaaaagacttgctaaaagggggctcttatggttacttgcttccgcgcttctcgcgatgccactgtagctcaggggtagagcaacgcattcgtaatgcgtgggtcgtcggttcaattccgaccagtggctccatcttcagagttggagcttgtcgcggggaactgccggatacatgcctcgttagctcagttggtagagcagctgactcttaatcagtttgtccacggttcgagcccgtgacggggtaccatccggtcgttcctgcaaggaacgccgccattccagtgcctcgttagctcagttggtagagcagctgactcttaatcagtttgtccacggttcgagcccgtgacggggtaccatctctttttaagtccggcttgctgatggcaaagccggacttttgtttgatagggaacgttgaaaaaacgatttgttctttccgattctcatttgccctgccaagcctcttttcgggcggtgcaagcatgcacgataatatggacaggcagttatttaaaatcaggtgttgaaatctcttggaaattacatttagtgttttaataacgacaacataaaaaattccatgcgaatgccgttcttattgattttctccgtacatggggaaaggatcgttttcgttcacgcatgacatttcaagaaaatattgtttggaatacggttctttgaaaacatgtccattgtaataagtggagacggcaaacatgtccgtcaatacggtgccgtttttaatgaatcttccgggaagtccccattgcttggaatcgttcaaagaccgcagatatcccttatatccccggtaaatgacatgatcgttattataaatgattatgttgtccgtatctccaatatcattttttcctagaaaatcccggatgttgtcggaatcaaaattcaaaaaatacggattttgattaaatgatacatcatcggaaaaaacaatatctccggattctgattttatttgaatatgggcacaattgttttttgtaaataaaatagttgccggaatgattaaaataaccaatgtaatcagaaaatatatttttaatagattctttttcacttaatatgatgatattttatgagtaattttcttccaatgttgtatatggtaaatttgctgtcagaaatttcattttatatttagttttaaaaatttacttggttggcagttgaggcatttttgatttataaatttccattacaaaaaatttaaataacttcctttatttatatagattcctactataattaataatgaaaaaaatttcatgcaagacattatgaaaatgatgctatatgcgcaactgtagattaatatgaaaatgatataatttattatagattcttttcttcgtgaatataatgacgtgatgatgctttctataatatttttaaaaaataaaataacagattgtttgaagaaccaaatgacaaaccatattaaccaccataaaaggatgtaataaatcaaatgtaaatcgaaagttctagcaagaccgtacccgaagtagacaagactccctataggaaaccagaacgtaaaaaaattattactggcagacatcaatatcttttttgttctatcatgcgcatattttttatttaaatacgaaataaaatgtattttttttataaataatgaaatgagtattacagcaatccaaaatactatccaataaaaaattacttcaatataatgcaaggtgaacgtgtgggtaaatacataaaggataaaataaatccaccataatattgaatacaatagaagaaattcgctggaactgtttccggatgatttgtaattaatgcaatatttaagggaaaaaggtcccaaaatggcacttaaaatagcaaatgctgtttttttatgattaatgaactccattatttatttaaatttcttaaataattatataatccttcaattccacggagacctgtaatgttcaataacgaatccaatgcttgccattgaaatgcttttaacggaaagatttttggacacccctcaatagtgccttctaatgtgatattgtatctagagtgatcatggcctaatgctcgatgtattgtagatatgggaccgccaactggatttttaaaatatggatatgctgattcaggtatggggatttgaacaaaatcatccggatggccatggccgcctactcttccgaggggtttacgcgttataggtaacgcagggtcgcgattaactgcatatgcaggtccccttaatttcccggaacttataattaactctttcgattcttttgtggtaatatgttggagattaactttagcggtgtttttagcggcagctccacctggagacgaaatgagccggttggcatcataggatacttgtgggtgaagtttctggtggttgcaggtgtggttccatcccaggagtcccggcgttgaacaggacgcatcagcgcgtcgtagccgtattcgtggccggctgccaattcgccattcgctccctttctgtaactgatggcggttacgaggtcgagcctgggatgataggtattgcagcggaccatgccgttggggtaggtgagatggttgaggaagccgctggttggatcgtactgccaggtaaagggatactccagtccttccagattcatcccgatgatggcacctttggaatcgtagtcaagatgggagtgctgcacggtacgggttccaagaatcaggcgatatccgttggaacgacccaaggcatcgtattgttcctgggtgcagttttccacggttccaaaggaagtgtcctggatcatgtggccgtaggcatcgtagaagcattccctgatgccggaggcgtcccggacgtaggtcatttgtccaatgcggttgtaggtaaactcccatccgggagtgttgtcgttgtgggagacggagacgagttctccggtgagaggagcataggcataagtggagacggaatttttcaacgccatgaaggacgtaaagctcaggaatgcgaagctggccgccttcggcagcacgcgccatcctgagcttgctgccttccgaaaccgcctgtagcagtctccgggacttggaccagatgctctcaatggctcccgtggaaggatggcggttcaccttcatctgccgggaatactcttccgccgtggtttccacgccggaggcggaaaccatggagacgacctttccggtggctgccgagaagcgtagggtgcgcccattgctctgcaccatgtccaggtaggcgggagagccgccggtgcagggagacttgtcggcattcagcttctgaaccttgtagttcaacttgcgcgaacttccggagacggaggctccggaatgaccgtcagaactctggaaggagatggaactgcccgtggggcgtttgacggagatctgtccggtttcgggattgcaggaggcggtccattcgaggggatgcttgtagcgcagggtgatgggacatggagaggaaggttcggcaagggtgcggagaagcgggggattgcctcctccacttcctcctccggaatcgccctcgcccacttcaagcagtccttcgcagtcgtcggccccgtccgggttgccgccgaagaaatgggaggtgttcttgctgcaatcggactgttcgacgtcttcgtcacaatcacaggaacaggggcatggacaacccccttcctccggctccgctggaggaaaaggagagtgaactggaacagctgctcgacgagtctccttcttccacctcctggtacaggttgaccaaggtcaggacggtttctccctccttgccggcgggagtgttttccgccagcaggtaataatccaggtcgggctcgccttccttgtcgctaaccagggcaatgcagaactcggcttccgccccctggccgggctggtgttgatggacgatatggcaccagtagtatccctggtcgaactggatctggcggcgcagaggggtggaagagcccggctccgtggagagttccagatccttggcgggaatggaaagggagatggaggagtgggcgtgaaggtggagaaaacaggtggagggagccatgaccttgaggtatccgaaccattcgtggcgggtgttgttggaagcagcgcgtttggggataaggacgggagcggagaggccgttgaccaggaagttgccctggggctgtccgttggggtacatgggaatgaaggggtagacggtgtccatggcgccgatgttgaaagtgttgttcatggtaatgaaggtagaattatgaaatggttgcggctaccatgaatcaaaaaccagcaacgtaaacacgccggagacgttaagaaaaagcgtcctggacagaaatgtagtgagggaggtatccggggcaattcctgcttttgattgcgtggtccggtctggtagtgtacgaatacggcagtgaaggagcggagcgttcaggattgtttcatggcccggtgtttcgccccggagaagggaaaggggagccgtcccgaagcctggaggcggttgaaagaggctttggtgaacaatttgctggaacggcaggcggaccatgaattccgtcttccggaaggattctctttttccctgcgggaagaggatgctcaccgggctgttactccttccgtgctggagggattgctggaacgctccctgacagatggccgccgttccggaaccgtgtatactcccggcttcctggttcgctggatggcccgggaggcggtatcctcctggctggcatccagattgcctgctccccggaatggtaatgaggaagccgggttgctgagaaatatccgggtgctggatttatccgccggggcgggggcattcaccatgggaatgcttcgggagcttgccgcgcgcagaaagagtctggagccggaatatgcggaggccgatttattccgtgccattctggaagagaatatttacggggtggatgtttgtgcggaggctctggaggtagcccgtttccgtttttactgtgcatggctagctgccggaggaaagggggatttccgggaccacctgctgtgcggggacagcctggacatgtctgcggatggcgtctggcggcagggcctttcagcggtgatggcggacggaggctttgacctggtaatcgggaatcccccttttgtcggggaaaaagggaacaaggagctgtttgaccgtctgaagtcttctccgttggcttcctactgctcttcacgcatggattactggtacgtgttcgcctgtgtgggtctggatgccctgaaacaggggggcgtgatgcatttggttgttcccaacaggtggatggcgaatgccggagcggctccccttcgccgcaagctgatggaagattgcggattgctgcgtttgtcggatttcggggcttgccgggtgtttgaagccgcacgggttcataccatgaccgttctggcggaaaggaagggggatgggggaggactcccggttccggaataccgccgtttttgcggtcccatggaagaggtggaatcctttctggaacatgaaccgtactgccggttttctttaccggaagataccggggcatgcgtcaaggaaggattgtttttctgctccgcagccgaatggaacgttctggagaagatggagagatgccggaatttcaggctggatgccgcaaaggaaatgacgcaggggattgttccgaaccccgatgtcgtttccgcccgtgcgctggagagcctggtgccggaggcagtgcagcggtccggcgtccggaggggggaaggggtgtttgtagtgccgcaggggtatttcaaccggctgccggctgcggaacggcgttttctcaagcctctgtatgaacccgccctggcaggaagatacatgttgaaagctccggagaaggtgttgctctacctgactccgtccaacgggtcggaacaggccgtcacgcttctccggcatctggaaaagttccgccccctgatggaagcccggcgggaaacccgcatgggccgcatgaagtactatcatgtgcactggccccggaaggaacggttcttccttcccggtcccaagattctggctgtccggaagtgtgcacggcccaccttctcctacacggaggatgaggcttatgtaatgatggcgttcaacgtgatacgcacggaacgcgtaagcatgaagtacctggccgccctgttcaattcacgtctcatgcagttctggtttctccgcagggggaagatgcagggggactttttccagatggatacggcacccatcctccgcgttcccatccgggtgcccggcctttccgtgctgcgggaggtggaagaactggcggataccctcacggcccgctattgcccggaaggggatgaacggatgaatgagctgatggaaggcgtttacggcctctcccggcaggaacgggaagtgcttattcaggcgtgctctccaccgcgggccgggtggggaagcatgccagaatgaggaggagcagccagtaggcggtagaaatgatacccaggaattgcgtcgcggtttcccctggatactggaagcgctccaggatggcccagttgaggaaaataatgacgcccaggcccaggtaaccgtaaccccacgccgtgttgaagccggcgtcccgaagccttctgatagtgacgcccagggtaggaagataaaggaccagcaagacgatttgggtaatgaagaagaaggaggctattcgggtaaaaaggatagcctgcatttgttccgggtcctgcatggccgccagttctccccacggaagagtgaccgcgacgatgactccgccgacaagactgaagatgaaggagaagaggttcatgaaaaggaaaaagccccagaactcgcgccggggagccgttccggagaaggcgcagtactttttcgtcaggcacaggatgaagtatttccagagagagggtcgtgttgtagtgtccatagctgccgcttttcataacatggctttttgaaaaacagcaacgccaaaagaaacatccgggcttgattttcggagggccccccttaaggtgtgcgtcctgcaacctgtttgtcgagcctatgatgaagcctgtttttctggggaaatacctgcttgccgcctgctggtgcgccgcttttcccgcggcggaggccggcgcgggaacggcgcagcttcacccggcttccggggattctctgccgtccctgtgccgtgtgctggaccgcgggcccgttctgtaccgggatgattcctcatggatcaggagggtgaagctgaccctgatcggccagtaccagacggcagccgtcagccccaatggagccaacaagttctgcccttcttccggcggccataacagcgagtggcgccgcgcttatctgggcggcgacgttgtgatgggggacggctcctggcgcctgtccaacctgacgaacgtgggggatctggaaggccgccaccgcgaagtgcgcggagaatggaccggcagccgcacggagtggtccctgtatgagctttatctggaaaagaccatgcccggcgtcaagttcagggccgggaagctgacgccgcacctgacgtcggaatactgcctggcttcctcccggattaaaacggtggagaggtccgccctgtgcaatgaattgattcccatctccaactgggggctggaggccaatttccagaaggacgccaggagcctgtaccattcctacggcgtttacctgaacgcgaatggtacggatttgaaggatgaaatccagtttcattccgcggataacctgtttgccctgaatgccatgaaatggaaggtggcttctcccatgtgggacagccagactctggggtaccagtacgcccataattttacggagtggcggggaaggaaggttccctcctcttccgattactgtggaacgggcgcgcaggacgtgctttccctgagctgggacgccagccgcggcgccttttccgtgatggggaacctgctggcgggcgtggggatcgtgggccagccgggcgcaaagaacgtgtacggtctggttctccagcccgtttaccggatttccccccacttggaaggcgtctttcagtaccagtgttccttcggaaaccgctccgtgaagctgaatacgcggtatgtgcccagcgtcacccattaccccgcgtgggtggacagcatgcattccttttacctggggctgaactgctacctgtgcccggaggccgtcaatgcggtcaagctgatgctggcggtggaatatgtcaccagccgcgtggactcaacaacggccagggccttcaacggatggtctgttttcggggccgtccggttcaagttttgatcccctcctgccgctattgcagtttcctcagcacagtgggctggtaagcgggaagcgccggaatgggaacgtatccgggggggagctggtcccacacgggatgcatgggctgggtgtccgcttcaaaaatggctccattgaaggatttaatgatggtgcggatggctccggacggcgccggctgaatcacaaaggggcgcggctccgattccggaaggttcatgtgcaggttgacttccgcttcgttccaggcgggccagacgtcggaaggcgtggagatttcacggatttccgtattggtggcggagcggggagtgtggaaaaaggggctgtccgggtctccatcgttcagccagacttcctcgtccggcgtctctgtcgtgatgatgagcccttcctggttatccggatggtagaattcgtagcctgaccgggcattgccgtccgtttccgtcctgtcgtcattcatgtggatgctgatggcaggcttgctccgggaagcggcctgccctagttgggactggaagagggccgcctgccgcttcagggcttccggagaagtgcctcgcgcgtatttggggaagaaaacgctcttggtgtctatttttccagggcgcactttcaccggttcatccgacagttcaaagatgtattttacaggaagttccgttgcggaaccccggtaacagaaacttcccagggacgccaggcccaggcacgtcaggagatacaggcgcggtacggatttcatcagaggttgaactggttccagtagaacaaaaatagggaaatattcaatgctaaaagagaaaatcccgcttccgcggcggcaggaggcatgttgtgcgtccccatgcggggacggctgcggcatttccgtcatttctcttcttggcagctccgtgcggctgtcctatggtaatgcgcatgatgaaaaaaattgccgtcttgtgcgtggccgcctctgcctccctcctgtggtgcgggtgtgaccgcaagcccgctgccggggaaaagcaggccgccccttccgggaaacgggaagagcctgccgaagaaaagggggaggccgcagcctggcgggaacgcctggacgccgcctccgccaaagccgcccgtgggaaagggaatgacagggagcacgtgaagacgctcaatgacgtggccgccctgtatgcggagggattgcagaacggctgggcccatccgctggatgtgcgctcctggtgtgactccgtggcggaaacgggttccggatattccggggagacggttatcggcgccatgttcctgtacggaaccggcgtcaagcgtgatgccggagcggccagggagtggtttgaatacgggctggcgcgtccaggaacccagcgggggaatgccctgtacatgctgggcatgatgtatttcaagggggacggcgcggaccaggaccggaacaaggccctggagctgtggcgcaaggcggcggatgaagagcatccggcggccatgggcctgctgggccgggcctacatggaggggaagctgggctttgacaaggatcctgcttccgggcgggtattgctggaaaaggccgccaacggggggaatacgccttcctccgtctatctggggaatatttatgcgaagggggagggcgtggagcaagacatggagcgcgcgatgaaatggtatgagcaggcggcctccgccggggacgcccgtgcccagtacatcgtgggactggcgtatctggaaggctccggcgtacccgtggatgaaggcaaggcgttcaactggctccggctggccgccgggcaggaccacgtcaacgccatgctgatgctttccgtctgctacagcaccggaaagggaaccccgcaggatgcggacatggcggaagtctggaaaaagaaggcgctccaactgaatgcggagcgggagggcagccgtgtcccgcagacggaggaacgctagtcttcccggatttcccggttcaggaattccagggcctgccgccgtttcagaatgacgttgccccggtcgtccgggatgaccagcaggccgtcccggtgttccagaatggcgtgaagcatggcgaacacatggcccagcgcgcattcgtcctccaggatgaaacgcagcatcttggtgcgttcccctatttgccggagggcggagcggtcccttttgaaggcctggcgggcatcgtccgtttccatgatccagaacacgtcaagctgggattctccctcttcgtccaggtattccccttccagcacatggtccggcgcgttttccggcgcgccggaaaggttcagccggaagcaggcgtccaggctgaacatgttcttctgcaattcctccgccgccggcaggggggcgtcctgaatgaaaagccagaattcctgttcgtccggggcaggggcggcgtgcgtcatgggcggattgtggcattcccgcggcgttttcccacccggatttgtgacattgaggcggtgcgtgcggatttttggatgttcaagggcttccctcccgattaaaaacaggggcatgagtattcccgtaatgatgacggttgccggttccgactgctccgcaggggccggacttcaggcggatatgaaggcggcccatgccatgggggcgtttgcgctcacggccgtcacctgcgtcgtgtccgaggcgccgggactggtgcgcggcatccaggaggtggaccctgagctggtggcggaccaggtgcgcatcaatctggagcattttccggtaagcgccgtgaagacgggcatgctgtactccccggccatcgtccgtgcggtgcatgaggtgctggcaggtacgggtattcccgttgtggtggatcccgtcatgatcgctacggcaggagaccggctgatgagggaggaggctgtagccgtttatgaagaacttctgctgccgggcgcggccttgctgacccccaatctggatgaagccgccgtgctgctgcgctcctccgtcaaccctgaaagggatgaactgccggaggctgccgcgcgccttgccatcaggtacgggtgccccgtcctgctgaagggcggccatctggaaggagactgccgggacgtgctggccggcccggacggccgcatgctgggggaatggaaccgcccgcgcgtgcgggatgtgagcacgcatggaacgggctgttccctgtccgccgccatcgcggcgcggctggccgccggggacggactggccacggcggtggagcgcggcctggaattcattgccgccgccatccgggaccacctgcgctgggagcatccggtccgggtggatgcgctgaaattgtggtagggaatcctttcgttccgccccgcctgccgccgttccctttttccggcccggttggaaaaagcggggactgccgccgtctttctgtgccttaataatgctttgtgcttgcgtatgggaggcggggttggtagttgtatccacgcccatgtgccacatggagctcttaagaattagtaaatatcatagcaattatcactatgggacagcaaatccgcaaagtcaccaagcgccgcagacgtgttgaatacatcaagcgtaagaaggaacagtccaagttgaattccaatacgcctatccgtctggccgttcccgttgccaaggacgccaagcctgccgccaaggaagctcccgccaaaaagaccgcggccaaggccccagccaagaagactgaaaccaaggctgccgccgccaagaaggctcccgccaaaaagccggctgccaagaaggccgccgaacccgccgctgaataattgcccgggcggaggttactgcctccgcgcgtcaatcaaacagtttttacaagccgtcgtgcaattgcatggcggctttttgcatggcatggccttcttgtgtacaaaggaaccgtgggcggcctgatttttcctggggcgcccctgcggatttcttcgttgtgggccatggcccgttcctgcccatgcttccgcggcatgggggcttctcccggacttttccggaatgatattgactctattccccggaggcgtacaaaaggaaataacaccattttgtttttctagccatgcgccaccgtaccaccgacaccgccaaaggacaccgcaattacatcatcattgcgtgtgacgtgcttcttttcctggccatgctcaagtggcttcccgtggagccggaggtagccagggggctggccgttctcaccttcatcggcattctgtggctgacggaagcactgcatgtgaccgtgaccgccctgctggtgccggtgctcgccatgttcatggggattcttccgggggcgaaggcattggccggctttgcggatcccaccattttcctgttcttcggcggctttgcgctggccggggcgctccacgaacagaaaattgatacctggctggctggaaaaatcctccggatggcccgcggaagcctggggatggccctgatcctgattttcctggctacggcgttcctctccatgtggatgtccaatacggccacggcggccatgatgctcccgctggtcatcggcctgctggaccgcattccggcggaaaagctcaagacgacggctccctttgccgtgctgggggtggcgtacagcgcctccatcggcggcatgggaacgctggtgggttctcctcccaacgccattgcggcgcatgagctcggcatgggatttgcggaatggttccggattgccatgcccattgtcctggtattcggagtgattgtcttctgcctgatgtacctgttcttccgcccgcggctggggctgcatgtggacatggccccggcggaaggggaggatgcggaggcccggctgaatgccaggcaggtgcgcgtgcttcttctcttcgtgctggtggccgggagctggatgtgcagcagctttctttcctccgctctgggcggcattccgtccatggacacgctcattgcgctgtgtgccgcggttctgctgcccctgtgcggggtcatcaactggggcggcatcgccaaaaatacggactggggcgtcctgctgctgttcggcggcggcatcacgctcagcagcatcctcgtccagacgggggcggcgggatttctggcggaccaggtatcttccctggccatggggcagagtcccattatcatcctgctcatcatcagcctcttcatcacgtcgctgacggaattctgctccaatacggccagcgcagccctggtggccccgttgatggtgacggtggcctccgccatgggcatgtccgccacgccgctggtgcttctggtgggcatcggggcctcttgcgccttcatgcttcccgtctccacgcctcccaacgccctggccttcgccacagggaaattccctcagatgaccatggtgaaggtagggctgctgatcaatgtggtgctcgtcttcgtgaaggctttctgggcctggatattctggatgtagcggaaagggctcccgtgcaggcgcgggctttgccgttccgggcgtgcggcgtggcctacttggccggggcggctgctccctgggccttttcctggagttcccgcgccgctttcttgtccagtttggccagcttggcaatcaggtagaagaaggaggggatgaagaacaccccgatgaagacggccgtaatcatgccgccgatgactcccacgcccaccacctgccgcgctgccgctcccgctcccgtggctacggccaggggaaggcagcccatgatgaaggcaaagcaggtcatcaggatggggcgcaggcggattctggccgcatccagcgtggccgtgagcaggtccgtgccctgcctcagttccagcacggcgaattccacgatgaggatggcattcttggccgccagcgcaatcagcacgatgaggccgatttccgaataaatgttcaggttcagcccgaacatccacagggccaggaatgcgcccaggatggcgatgggggcggtcatgaagacggccacgggcagggaccagctctcatacagggaggccaggatcaggaaaacgaacacggcggacgccgcaaagatcatgccgatggtgatgcctttctgcgcctgtttttcctggtagctcatgccggagtagtcataccccatgccggacggcatggtctgggcgaagacttcctccagggcattcatgacctgcccggaggaatagcccggagccggggtgacgttgagctgggagctgttgaacatgttctggcggatcaggaattccggcgcccagccgtgagtgacgttaatgacggaatccagcgggaccgggtcgccgtcattgttgcgcacgtaaaacatggaaagcttgtcgatgctgttccggtacggggcgtccgcctgcatgtacacctgccattcctgaccgtaaatgttgaaattgttcaggaaggtgctgcccatatacgcctggatggtggcgtaaatctcatccacgttcatgttctggagggtggcttgctccgtattcacgttcagattgtactgaaggttggagggagacatgaaattgctgatgcccgcgatttccggcctcttttccgcagcctcgatgaatttggacgtattggcggccaggaatttctccccgatgccctggcggtcctccagcaggaaggtgacgtctccggatgtgcccacgcccggcaggggcggcggcgggaccacgtacgccatgccggaggaaatctccgcgttcagcttgcttttcagccgggcggcgatgccgtccgccgtcatgcccggggcggtgcgttcggaccatggtttcagggaaatgaagaagaaggaattggaggagctctggacggagctgatgaggttgaacccgtttacggtggtgaccacttccacgccgggatcttcccggatgatctgttcaatccgcgcggcggtggccgccgtgacgttcagggaggtattatccggcagttccacgccgccgaacaggtagccctggtcctcattgggaaggaagccggtgggaatgagcttggcgagagggaagaggaggacggtcatggcggccagcagaaggatggaaagccacatgtgccggatgagcttggcacaaatttccacgtaccagtcgcgcgccttgttgaagcccttgttgaataacttgaagaagggccccagcagggggatggaatctgctttccctcctttcagcagcccggcggacagggtggggctgagggacagggcgcagaaggcggaaatgatgatggacatgccgatagtcacggcgaactgctcgaacagcttgcccgtgacgccgggcagtagcagggtgggcacgaacacgcaggaaatcaccagggccgtgctcacgatggggccggatacctccttcatggccgcgatggtggcctggagcggcttttctccgttggaaatatggttcttcaccgcctccaccaccacgatggcgtcgtccaccaccaggccgatggccagcacaaggcccatcaggcagatggtattgatggaaaagccgaaaaacggaaaggcgatgaaggcgcccacgatggacaccggcacggcaaaagccggaatcagcgtgccgcgccagccctggaggaagatgaagaccaccagcacaaccaggcccagggcgatcaccagcgtgctgacgatgtcttcaatcccggcgcggacggccagcgtggagtccagggaaacgaggtaatccatgccggggggcatgtccgtatcgttcagcagggccttgatattgtccaccagctggatggcgttccctccgggcgcttcgtaaatgccgatggaggcggcgggcatgccgtttacggaagagctgaggctgtaagtctccgaacccagctccacgcgggcgacgtcgcccacccgcacgatggaactgccctgtccgcgcaccacgatgttttcaaactccttcacgctggtcaggcgtccgggcgccttcacggtgaaggaaagctgctggtccggcggagcgggctgcgcgcctatcttgcccgccgggttcacggcgttctgggcctgcaccgccagcatcacgtcacgggccgtgatgttcagggcggccatcttttccggattcagccagatgcgcatggcatagcggccggagccgaacacctgcacgtcgcccacgccgggcacgcgcttgatggcgtccaccatgttgatatacgcgtaattggccagccagaggccgtcgtaggttccctggggggaataaaggctgacgaccaaggcgggcagcccgctggtcttgcgcagggagacgcccagttcgctgacttccggcggaagctgggaggtggcctgcccgtagcgcaggtaggaaagcacctggtccatgttcgcctccgtgccgatctcaaagaggatcatcatgctcatctgcccgttgttggtattgacggaagtcatgtaggacatgccgtccacgccggacatctgctgctcaatgggggatgcgatggatttgaccaccgtctcgcagtccgctccgggataggtggccgtcacctggatggaaggggggatgatgtccggatactcggaaatgggcaggcgcagaatggagaagatccccagcaggacgatgatgatggagaggcagatggagaggatggggcgcttgatgaagaaatcggccatggcgggagggacttattggttgctggcgggtaccgctttcaggcgtgcgtccgggtttctggaggccatttccgcctggagaaggccgtccacgaccactttgctctgcggggtgagggaatccggtttcagcggaatgacctgctgccggtcgccgagttgcgttccggcctgcacggggatgatggaagggtggttgttctcatccagcgcaatgacgaaaaagcgcccctgcgtggaaagaagagcctttgccggaacggtcagcgcgtttttgacggtagccagccgggccgtagccatgatgaacatgccggggcgcagcaggtaatcggcattggggaggttggcctgcacgcggatggtgcccgtctgggggttgaacgcccggtcaatggctaccaccgtagcctgttccgggtatttggtaccgtctttcagcgtgatatccagcttgctgcccgtctggacgccttcattcccgttcttgccggcctgctggatccattcctgctgggtgacggcaaagttgacgcggatgggattgacggaggatacgacggcgagggggccgctttccgggctgaccaggtcgcctatattcgtcttggaaatgccggcgattccgtcaaagggggcatacagcaccgtataggaaagattcttttcagccagggccagggccgccgtggcctgctgcacctgcgcttccgcggcaatggcggagaggcgcgtatcctcgtacttctgcttggaaatggcgttctctgcggccaggggcttgtaaatctccgcgtcataattcaactgctggagctgggcctgcgcctgttccagcgtggctttggccctggagacctggtccttgaaggtggaatcgtcaatgcggaaaagcacctcccccttcttcacaatggcgccgttggcgtaattctgcgtttgcaggtagcccgtgatttggggaacgatggaggcgttgtccacgccgtccagatggcccacccagcttcccgtcaccgggatgtccatggcaacaggctgttcgtaaataagcgtgggcgtttcatgcggcacctgttccgtctttttacacccggaaaaaaggagggagaacaagaagaggagaacggcggaaccggagatagagcccgtcaggcgtgtcaagtccatgctgtgaatgacacgccggcggcctcctttgttgaaagaaggctttccgggcggcagcgccgtccgtgtcatgcaggtggattttcacccggatgacgcggcgggacgtcttacgggcgggcggaggatttgtccggcgtgaaggcgcgcaccagctctccgatccacaggacgagggaggtgccggcaaagatgatgccccagtccgtccagctcaggggcaccacgttgaacatcttgccgccgaaggtgacgatgacgtattgcccggccaggatgagcagagccaccactccgaagcccccgatgctggcgcccatgcgggcaaaggcgctctggtgcgtgttgaaagccttggcgttgaacatgttccagaactggagaaggacgaagatggtgaaaaacagggacagttcatagccggtcagttcatgctccggtgaggagaagtccaggtagctgccgaagtagccgctgaggctgaactgcgtgaggctggtgacgtccgcatgcttgaagtattgcagcaggccgaacaggaaggccacgaacaggatgcccacgcccagaatgttcctgcccatggggcgggtgatgatgtggtccgtcgtcttgcgcggcggatcctgcatcacgcgttcgtccggcggcagggaggccagggccagcgcggcgaaggtatccatgatgaggttgacccagagcatctgcgtgaccgtgaggggggattccgtgcccaggaacgcgccgatgagcacaatgaggcaggccgccacgttgatggtcatctggaagacgatgaagcgctggatattccggtacagggagcgtccccacatgacggcgcgggaaatgctcatgaaggaattgtccaggatggtgatggcgctggcctccttggctacggtagtgccgtcacccatggagaggcccacctgcgcggcgttcagggcgggggcgtcgttggtgccgtccccggtgacggccaccacctggtccttcttctggagcagcttcaccaggcgttccttgtccatgggcctggcgcggcacatgattttcaggtccatcacgcggtccagcagttccgcatccggcgtctgttcaaactccacgcccgtcatcaggcggtccggcgtgtccgcctccgtccacaggccgatctggcggccgatttcccgtgcggtgccgggggtgtcccccgtgacgatcttgatattgatgcccgcgtccatgcagtccttcacagcctggggcacgtcgtcccggacggggtcggaaatggcggcgatgcccaggtaaaccaggtctttgcggatgacgcggccgtcctcaaacaccggggcgtcatcatccaggattcggtacgcgaagcccagcgtgcgcatggcctggttctggtaggccaggagctgttcctcaatggcggggcgcatgtccgcggcaggaacctggccttccggagtcaggacggtggagcagaggcccagcacgatttccggcgcgcccttcacgtaaaggacttttttgcccagcaggggggattccaccacggtagccatgtacttgcgttccgtggaaaaagtgagctgttcctgcacgcgggcgttttcccgcaggtccaggtaattcacgcccagcccgtgcagccacaggaggagcgccccttccgtggggttgcccagggccttgatgtgttccgggtccgcatagtccaggaaggcggtggagttgacggcgatgccttcccggatcaggttgcccagctcgccgtccgccggggcggcgttccccaggccgtagaagtctgccttgtatacattcatctggttgcgcgtcagggtgcccgtcttgtccgtgcagatgacggtggcggcccccatggtttcgcaggcgtgcatcttgcgcaccaggttgttgttggcgagcatgctcttcatgctcagggccaggctcagggtgacgctcatgggcagcccttccggcaccgtaaccacgatgacggtcacggcgatcatgacggtgttcagaatgtaggttcccgcgctcagccattccacggggccgggcaggtgggagaagtacagggtaaggcgcccgatgatgataagggcggcaatggcgtagctggcccaggtgatgaggtcgcccagcctggaaagctggcggttgaggggagtctgcaccttgttgtcgatctgggagccttcatagaccttgccgtattccgtcctgtcccctacggacgtcacttccatgatgccgtggccgtccgccacggtggttcctttcagaacgtggttggaggggtaggtggcgtccttcttgaattccgcctcattcgtggttttgccgatgaggggttcccccgtcagcgtggattcgttgacctggagggaaacggcttccagcaggacgccgtccgccggaacctcctccccagtgttcaggatgacgatgtctcccaccaccacgtcccggcggggaagttcgcagatattgccgccgcggatcacctggaccatggtctcgtcgttgacctggttcaggatttcaaacttcttgttggcgcttacctcgaaggcgaagcccacgcaggtagccagcaggatggctaccaggatgcccacgggctccaggaagacgctggccggttccgctccggtgaagaactggtagcaggccacgcccacggacaggagcagggccaccagcagaatcttgatgatggggtctgaaaatttctccaggaactgcttccacaggggttcctttaccgggggcgtcaggatattgaccccgtatttggtccggttttccagaacctgctgttccgaaagtccctggtgatgtgctgcactcttcatggttgagatgtttctttacctgattggagtccgtgagaaaagtgcggaggaggattttcagggatgatgacgggagtttttgggaaaggagcggcgcggcttgcctcccgtgccgtaaaaggcggcattgttgccttgactttgacggagttccggcgattctgaagcacctatgtggaatgatctttctcatggcctttccgtactggcggacgcccttgccttcctctcccgctcctgggggttctgggtctgcgtgggcagcgtggccggactggccgccgtgtatgcgtggtggagaaagcggctggccctgtgggcgtttgccctggcgttcctttccctgctggccgtggtgggcctggcgtgccgccaggtgatgcatcaaaagaccttcctgtggatccaggagccggagctccaggccctgtccggaaagtacgaggtggaatcctcccccagggagcggtggtttttccggcctccggagctgaagcgctttttccaggtcagctcctccacgcttctcctgaatgaagacggaacgtgcgagatttcctccttcccgcgcccggaggcgtggggcaggtggatttcccgcccggaagacagggatgacctttccgtgctggaggaggacctcgtttcctcctgccgcggaacctggtccctggtgaagaaagggggatattacggcgtctccatcgtttattcccccggcagcagtttgacgctgtacctgggcggggagaatgcggaatgcctggtgatgccggtcaacccctccgacccgctggaagcggtgacgtttgagaaaacgttctgacccgggcgcagggacgggtggaaaaaatggagggaggctgcttttcctgcctcccccccaatgtagcttttcaagtgccgcttctgcttgagcgggagcgtggctccgggactccggaagcttttatttgacctttcctccttcgtacaccagcacttcaaagggcttcagcgtgaaggtgagctccttgtcaatgtttacggtcttgccggagaagccgtccagctcccgctggtcgtcataggaatccttgaaggtgatggaccccttgacgtccgcgggaatgtccaggatgccgcgcagggtgccggtcaggctcttttcctggtcggaggaattgcggagggccagggtggccttgtttttattccatgcggcccagccgtacacggccccttcattggcctccttgttccacgggttgccgcccacccagtgcacgtcgtccagaacgtccgcgttgcggcgtatccatttaatgcccttggccaactcgtcccacagcatgccgtccttggcgttcatcaggtccctgtccacataaagctcctgcagggaggtgccgcaggccgtggcgcagcggagttccttcttcacgttttcagggtcgcggggcatgcacgcgggcggcccgaacttggtgaccatcaggccgtgggtcatcatggaattgatgggcatcagcggggaaccctgcacaaagacctcatgcaccaggcggtcgcggtaggtgatccacttgtcgcggttgtcgcccacgccgatcgttccgaagtcgttttcctgcctccatacggaatccgcataacggaaccagaacggggaggcccaggtgcccacggtgcaattgatgtaaaggtcccccttcttcttgcgcagggcattcagcacgcggatgatgccttccgcatcctcctcgttgccggggcccttggcgtggaaatgggtgctgatgccgtcgaatttgaagtacttcatgttgtagtccttcaccatctgggagcagcggcccacaaaggcgtcaaagtattccttgttggaaagctggaagttgccgatcttgttgtccgggtgcttcacgttccagtgggccaggcgcttgcccttggaggctccgtagccgcccaccgggcccagccaggtgccgatgccggccttttgtttacccgcagcggcgtcaatgcgcctgaagccctgcgggaacatcttgtggaaatcccacaggctgttgaactcgtcccagccgtcgtcccagacgaaggcgtcaatggacatgccgcgcttctggaaaaactgttcctgccaatccttcaggacggccaggcactgttcttccgtcatgcgcttggcggggtctgaatcattgttccggttgatgttcagttcataccaggaattgtaatggatgaaggggcggtagggcatcacgcgctcccgctccatataggccaggaaggaacggcgttgctggccgggggcgaagatgccgaggacggaggatacctcccacacctccctgggctgcatggtggttttgcggctccagacgccttgggcgagctgggaatcgtccgcctgggcgtcttccttttcctccagcgtgcgcacgggcagggagaaagtgatttcccccttgctggcaatcggttcgctcttggtctggacccagtagcgcagcaggtaattccccttggcgggaacttttacggtgtaggaattgttggcattggcgtctccggtactcccggcgtggaagtcggaatcaaggacggcccccttggcggaaaggagctgcacgccggcggtgttcagcttgttgtttcccttgtcgcctcccttgtactggaaagtaatgatgcaggagcccttgccgtcaatggtgacggggccttccgcgcaggctacctgttccccgtactgctttttcagctcctgcggaatgttgaaattgcccgtccatgaagccgtggaccatttgtccgcgttccaggctgtggactccccgcctgccgcgtttccggagcctcccacggtgttgatgcccatgggcgtttccagggcggtgaacgccaggtcgttcacgatgagcgcgcccctggcattgccggaaacggagggggagcccgccttcccttccaccaggtcatactgcatggccacgatgctcttcatctgaatgggctttgtgctcaccaggcggagttcctgccgcaggtagtgggaattgtccctgagtacggcgcgccaggaaatgtgcagggagccgttcagcgcctggaaggaggccgtgacggcttttccagggaagcggtccgccagtttgaacgccttggggttgggctggagggtgacgagtttgacgtcccccgccttcaggccggaggacttgatgctctggccgtcctgaagattgatgatgaacaattcgtccccggccttggctacagggcccagtttggacgtcattcctccgaaggaaagcttcccgccccggttgaggaatttggccgtcaggatgttgttggaaagggtatagccggagggcgcctgctccgcattggccgcgccgggggtggggcccgggaagacgactgctgcgggaacggtggcaacgcttcccagaacggcggccatcaggagagctttagtgaggaatttcatggtttggtatcaaggaaaatggaactaccttgccaagatagaccccaacgcggtttcttcaaggaaaaagcctcccggcaggagaggcggctgtttgaaaatctgtcatggttttccgcgcggaaggaacttccggtatctatgacacacaagcattgatttttttcaaccgatcttggtctaatctgcatgtatacggtagctgatcagcttgttgaaatcttggaaaaagcgggagtaaagcgcatttacggcattgtgggagacagtttgaaccccattacggacgctctccgcagaaaaaaaaccatcgaatggatccacatgaggcatgaggaggtgggtgcctttgccgccagtgcggaagcccagctgaccggtaacctggccgtgtgctgcggcagcagcggccccggcaatcttcacttgatcaatggcctttatgatgcccaccggagcagggcccgcgtgctggcgatcgcctcccacatcccccagagccaggtgggggtggactatttccaggtgacccatccggaacaactgttcaaggaatgcagctcttatgcggaactggcttccacggcggagcaggctccccgcgtgctgatgtccgccatccagcatgcctattccctgcatgacgtgggcgtcatcgtgctgccgggcgacgtggcggacgcgccggcggaggccaaagacctggtgcatccacccgcctttgcccgggaaacagtggttccggaccatgaatccgtggcacgcctggcccagatgctcgcttcacacgaccgcattactttcttctgcggtggcggctgcgccggagcggaacgcaaggtggtgcagctcgccgcccgcgtgaaggccccgattgcctatacctggcgcggcaaggactattttgagcatgacaaccccgtgggcgtaggcatgaccggactgctgggctggggtgacgcgtacaaggccatgcatgagagcgacctgatcgtgatgtgggggacggatttcccctatttcaacttccttcctaccaagcccgccatcgtccagatcgaccgtcgcggggaagtgctgggccgccgctgccacctggacctgggaatctgcggggacgtgggcgccacggtggacgccctgctgggaatggtggaggagaaaaaggattccgaccacctggacgcctccctgaagcgtcacgccaaggatgtgaaggacatgaatgcctacatggacgggaacgacaaggaatcgcccatccgccccgaacaggtgaccaccgccgtgaacaagtacgcggctccggacgccgtgtttaccgtggacacgggcaccccctgcatctggagcgcgcgtttcctgtgctccacgctgggcagaaaaacgctggcttccttcaatcacggctccatggcgaatgccatgccgatggcgatcggggcccagaaggcgtacccgaaccgccaggtagtcgccctgtgcggagacggcggcctgtccatgctgctgggggacctcattaccatagcgcagtacaagctgccggtgaagctggtggtgtacaataacgactgcctggacttcatccagttggaaatgcaggccgcgggcctgattccgtggggcatcaacctggacaacccctcctttgccgccgtggcggacgccgtgggcatcaagggttttgtgctggacaagtcaagccaggtggaccagatggtgaaaacgttcctggactacccgggcgcggccctgctggatgcccgtgtggaccgggatgccatcgcgctgcccccctacatcagcctgggacaggccgcggacttttccctggccatggtcaagcagacgctgaccggggaagtgaagcaggtgtggaacacgctggccgggaaccggaagctgttcaagccctgagggcttgaacaaaaatactaaataggaaagaccaaatactaaagctagtgccggaaaatatttggtctttcatctttagtttttggtcactgttctgaaagagcctttttcagcgcttccgtcacgatcttcgggttggctttgcctttggcggctttcatcacctggccggtgagccagtttaggagcttgtcgttgccgccccggatttccgccaccttgtccggattggcggaaatgacctcctgcacgatggcgtccaggaaggaggaatccgccttttcaaagccgagcagcttggctgcctgcgcggcgttgagggacgggtcttcccacattttggtgaatacgtccttggcctggttgttggaaacggtgccgtcgtcaataatggcgatcaggtcccggatggcgccgggcttcaccgggcattcggacgggcgcatgcctttttcattcagcacggcggaaatgttgttgatgacccagttggcgatcttcttgccgctggcggttccctgcgccgcctcttcaaagaagcgggccagttccaggtcgcccaccagcacgttggcgtcatattcgctcaggccgtattcctccatgaaccttttctggcgttcctggggcagttccggaatctggctgcgcaccctctccaccagcggggcggtgtgtatgggcaccaggtccgggcaggggaaatagcggtaatcgtgcgcgtcttccttggtgcgcatgatggagctttccccgcgttcgtcgtcccagcggcgggtggactggatctgcgccatgcccatgtccagttcttccgcctgtcgctggatttcataatgaagggcgcggcgcacggcggacatggaattgagattcttcatctccacctttgcccccagttccttctggccgtggggacgcagggaaatgttcacgtcgcagcgcatctggcccttctccatgtccgcgtcggaaatgtccccgtaattcagaatctgctggagggacttgaggtaggcgtaggcttcctccggggtatcgatgtccgggtcggagacgatctccatcagggcggaccccgcgcggttgtagtcaatcagggaataattggcgtggtgggtgatcttcgccgcgtcttcctccaaatggatgcgggtcagcttcacggtgcggaaggggggcacgccggccttgatcacgtcgttcgggtaggaccagggatacaggggcacctccccgcccaggcacagcggcaggtccagctgggaagtctggtaattcttcgccatgtccgggtagaagtaattcttgcggtcccactgggaaacctccgggctggagcatcccagcatcagcccggtcagcagggtgcgttcaatggcgaactcattcaggacgggcagggcgcccggcagccccaggcaggtggggcacacgcgcgtattgggttcaaagccaaagccggtctcgcaggagcagaacattttgctcttcgtcttgatctggcagtggacttccaggccaatggtcacgatgtaatctgaaattgccataaattcggaacgcttgaatatcgcgcaaactgtacggaaccctcttctccctgtccagtaaaaaggcctgaggcgggagagtggagagtggagagtggagagtggagagtggagagtggagagtggagagtggagagtggagagtggagagtggagagtggagagtggagagtggagagtggagagtggagagtggagagtggagagtggagagtggagagtggagagtggagagtggagagtggagagtggagagtggagagtggagagtggagagtggagagtggagagtggagagtggagagtggttttagattaagaattattttttaatttgaagggagacggtttttgtggtggaggtgaggaggcgtttgagttcttctccatcccggtaaatgctggcgtgcatttcttccgtcaggaaagaggtgtctttaagcaactccagccaatagagggtttccgagcattccttcaaggcaatgtaaattttggaaaggaaatcctttttgctgatggcgcattccgcttccgccaggttggctccaatgccggtaccgcttctcagcagttgttttgaaagtacgaactcgttcctgtcattgcacaaaaactggtacaaacgaacgatccgaacagcaaatttcctgctttttactctagtaattccctccatcactaaactctccactcttaactctcaacccttcataaaatgcccaactctttaagctgctggagggggcgttccggccagagcttgttggcgatggggctggcggggctggggtggagcagggtgccgatggtgaagcttttgccggggagccgttcggcggcgtcccgcagcttctgcgtggcgtaggctcccacccctaccagcgtatgcgggttcaggatggtgattagggaaaccaggtgctccatgcatactgcatccacggcggcgcgctgttccgccggtaatttgtccggcgtgatgttggctcccgttgcccccatccagatcagcgggcagtagttggccacgtaattgtgacggaagaagtttttcgcggtgccgaaggcttccgcaaagagcccccacaggcggcgcccgctgacttccgaccgagggcagccgaagccctccacgggacgcttgggatgggtgtgctccggcctgccgacttctccgcggatgtgcagccagttgacgaccgcatccacttccccgaaggggacgcccgtctgggccatgccgaaggggccgggattcatgcccaggaagaagtggctcttttccccgttcccgtaggcgcgcacgtactgctcatgcggcgcccaggcgtaggtgagcgggttgtaggtaaagtggaccgggtctccgaactggagccgctccgtaccgtcccggagggcggccgtggccttcagaatggctgctgcggtgtcgttcatgccgctgcatcatgaagcgttgccgtttattgcgccagcaaaaactccgcgcttgcattatttgcccggcccggtaacatttccccccggacaagttaaccttattacttatgagtggaatagccattatgacatcaggcggtgacgccgccggaatgaatccggcgatcagggcggctgtggatcatgcccgccagcttggaatgaacccgtacgttgtctatgacggcttggaaggactgatcgatggaaaaatcaaggaagccaccagggaactgaccagcgacatgatttacaggggcggcactctcctccgctcctcccggtccaagcgctttttcgattatgaattccgcaagcaggcctacgaacacctgaaggaccgcaacatcgacaagctcgttatcatgggcggcgacggttccttccgcgcgctgaacgactttttcaacgattttgaagtgcccttcgccggcattccggccacgattgacaacgacatcgccggcacggactactgcctgggcgtggacaccgcccagaacgtgattctggactgcatcgactccgtccgcgacacggcccgctcccaccaccgcgccttcgtgattgagacgatgggccgggactgcggctacctggcgatgaccaccgccctttgcagcgcggcggacatctgcatcgtccctgaaatcccttacgacctggaatccatttacaagcgcctccagcccgtcatcaatgaggaaggaagctgcatcatcgccgtggtggcggaaggcacccgcgtggcgcagtacctgacccgctggctgacggaacgcgccggcatggacacccgcctgaccgtgctgggccatgtgcagcgcggcggctcgcccaccgcccgcgaccgcctgatgggcacccgctttgccacccgcgccgtggaagccctgaacaacggggacatcaaccagatcatggtgtaccatgacggccagtacggctatgcctccctggacgccgtggccgggcagcagtattccgtgaatccggacatcatcaacctctgccgggaactgagctgctagccggttccgcggttcctgcccccgcttttccgcgcccatgcctccatgttcccggcggcatgggcggatttgttttgaaaaaccctgccgctgctgtatgatggcgccgcatctttccctgaaaacagtgttatgaaagttatcgttacgggcggcgccggattcatcggctccaatctggtcaggctgctgcttgagcgcggccatgaagtcctgaatattgacgccctgacttatgccggcaacgtccgttccctggacggcgcggcggactctccggcgtaccgcttcctgcacgccgacgttcgggacgccgccctgatgcggaacaccctgcgggaatacggaccggactgggtgatgcacctggcggcggagtcccacgtggaccgttccattgacgatccgggggatttcatgaccaccaatgtcatgggcaccttttccatgctccaggccaccctggaatattaccgttccctgaagggggagaagaaggagcgtttccgcttccaccacatttccacggacgaagtatacggctccctggggaaggacggcctgtttacggaatccacgccgtaccgcccccattccccctattccgccagcaaggcgtccagcgaccatctggtgcgcgcctggcatgatacgtacgggctgcccgtgctgattaccaactgttccaacaactacggcccttaccagttcccggaaaaactgatccccgtggtcgtcctgaaggccctgggcggcgagcccattcccgtgtacggcaagggggaaaacgtgcgggactggctgtacgtggaggaccactgcgaagccctgctgacggtcgtttcctccggaaaacccggcgaaacgtacaacatcggcggcaataacgagaaaacgaatctggagctggtggagctgctgtgctcccatctggatgaattgcggccccgcgcggacggccggagctaccgggagcagatcacctttgtgcaggacaggcccggccacgacctgcgctatgcgattgatgcgtccaaaatacggagggagctgggctggtctccgcgccaggaccattcctccgggttcaggaaaaccattcagtggtatctggaccatgaggactggtggcggggaatcctgtccggggaataccgtctggaacgtctgggaaccaatggctaggaaattgatatgaaaggtattgttctggccgggggaagcggcacgcgcctgcatcccgtcacgctttccgtcagcaagcaattgctgcccgtttacgacaagccgatggtgtattaccccatttccgtgctgatgctggccgggatacgggaaatcctcgtcatttccactccgcgggacctgcctctgtaccaggatctgctgggggacggaagcaggttcggcgtaacttttgaataccgggagcagcccaggccggaggggctggctcaggccttcatcatcggggaggaattcatcggaaaagataccgtggccctggtgctgggggacaatattttttacggtcgcggcctgacggagaagttgaggcgcgccgctgaactgacgagaggggcgaccattttcggttaccaggtgcacgatccgcagcgtttcggcgtggtggagttcaatgaagaaggaaaggccgtttccattgaggaaaaaccgctcaagcccaagtcggacattgccgtgacgggcctttatttttacgacaaccaggtggtggagatcgccaagaggattcccaaatccgcccggggggagctggaaatcacctccgtgaaccaggagtacctgaaacagggccttctgcgcgtggaaaagctggcgcgcggctatacgtggctggacacgggcacgcacgacacccttctggaggcttccatgtttgtccgcaccctggaacaccaccagggcttcaaggtggcgtgcctggaggagattgccttcaacaacggctggatttccgcagaaacgctgcgtatccaggctggagccatgaaaaataacggctacggctgttatctggatgaaatggtgaaatagcgctccgggccgtacggcaaatgcggggatttagtgcctatccatccccgccgggcatttccgggtcctgaagctccggaagggaggctatgcccgttacgttccggcacagggtccacgccaggatggcggaaagcacggccagcgcggcgtccagcccgcaggaaagcagaagcgctgcataggggatggctgccgccagtgagacggacaggccggacagcgcgttccacagaagcaggaacaggaaaaacaggacgccttgcagggcgttgcaggcagccaggatgccccaggccaggaacaattttctgccgggtgcggggtagccgcgggtgtagggaaaggcgaagaaggcggtgacggccgccagaagcagaaacgtctcccatgttctccccatctccgcatactggaacggcacgggctgcgccgtgaacggaatgagaagggcgtacagcgccgggaggaccgtcaccgcgctcaggacgcgggtgatgcggctgccgcgggaggccagcagaacccggcttccccacatggcgatgcaggacagggaaaggatgcccagcagggccgcccaggttcccgtgcgcatgaagccctccgcccgttgcgtggaatggaccaggacggccatgaagatgtgcaggaaccctaccagcatggaacacgcgccgaagacgatggcgcaggcgcggataaaagccttggcggcgggatagatcagccaggcgtctgcggcgggaggcggagggaatgggggcgtcatgctggcggagaacgtggaaagtgagggctacgaaaaagggccgcttcccgcacggggaaacgaccctggaagtgtagcgttcagacggaaatcgtcaatgcggatcaggcggagaagtccgcgttccgcatgtctccggtttcctggaacttggtgtgcatttcaaaggccttcgccaggcagtggggcgtgtggccctgcggcgtgagcgcgatgtactggcgcagcttttcctggtaatccggatggacgcacttggtgatgatttcctccgcacggtcgcgggggcacttgccgcgcaggtccgccacgccgtattccgtcacgatgatgtccacgtcgtgttccgtgtggtcatggtgggaaaccatgggcacgatggaggagatggctccgcccttggccgtggaggggcaggtgaagatggtcaggtagccgttgcgggcgaagtccccggaaccgccgatgccgttcatcatctgcttgccgaagaagtgcgtggagttcacctggccgaacaggtccacttcaatggccgtgttgatgcagatgaggcccaggcggcgcacgatttcagcgttgttggagatttcctgcgggcgcagaagcaccttggacttgtagaaatccaggtcctggtacatttccgccagcttggcgtcggaaacggtcagggagcatcccccggcgaaggtgcagcggccgtccttcatcaggttgatgacggagtcctgaatcacttccgtgtacatctggaagttcggaatcttcttgttgcggcccagggctcccagaacggcgttggcgatgttgcccacgccggactggatgggaaggaaggaggcgggaatgcggccggcttccagttcctcttccaggaacttggcgacgttttcaccgatcttgtccgtgatggggtcgccgggcttgaaggcgccgatgccgtccggttcattggtgcggacgatgcccaccaccttggccgggtcaatcttccaggtcagcgaaccgacgcgttcggagggctttgtcagcgggatgggctggcggttgggcgggtcctggggaagcatcaggtcgtgcatgcccttgagttccttgggatggtaggcgttcacttccacaatgatgcgttccgccagttcacagtaggtgggggtgttgcccgcgccggtggtcagcgttatttccccttccggcgtaatttccgccacttcaatgatggccgttttcacggagggaatatggccgtagcgcatgtacatggccgtgtgggacaggtgcatgtcgttgtagcgggtgcggccgctgttgatgttcttgcgcagggcgggggaggactggtagggcgtgcggccgtccacggcgtccgcttccgccagggcgccgtcggcggaggcgctggtggaggctccggagaaaatgtttaccttgaacgggcggcccgcttcatgctccgccacggccttggccgcgatggcgcggggaaccgccttggggactccggcggcggtaaagccgctgaagccgatgttttcaccatgttctatgagagctgctgcttcttccggtgttaattccttataactcatgtcagttgatttttgttgaatgaaaatgaaaaagccctccgtatactctgtataaagagggaggcaggctcaattttccgtgagcctgttgactaggtgcgccggaatggtccggcggccggtcggaagggataacacaggattaccctgatcgtcaatccccgtaaaaattccgtggatcatttcgtcatccgtggcgatggtcacggggcgcggttccgcccatgcctctgccagggaatcccgtatagcgggaatgccgcctttggaaaaagcggtgaatacccggttcaggtggcttcccagggaagccatgacttcatgaatggacgggcagtccgaaacaaggtccgcgaggcgtgcgggaggatcctgcaccatgccggcgattccggccacgtcattgaaaatattaatgcctatgccgatgacggccatatgcgcggcgggccgttccacgaggatgcccgccagtttggatttgcctgcgagcaggtcgttcggccagcgcaggcggacggaatcaaggcccatgccgcggagcatgctgagcagggccagccctgcaaccaggggcagatggccccagtccacgccgtccgcagcgtctgcgggagtgtccaggggaacattgaaggatgcccacaggccgccttcctccccgatccatttgcggttgaacctgccgcgtcctcctgtctgcacgcggcagacggcaatgtgccaggggggcagggcgcgggccaggtcgttggtggaaaaagcctcggcccattcatgataggtccagttgccgcatggtccttcctcctctgcaggagtggaaaatgaggctgtggaattcatgggatgggccgaggcctggaataatttcaaatcaggttatctcgccagagtggcaatgtagtagcctgcgatgactgcggtgccgatcacgcccgcaacgttcggtcccatggcgtgcatgagaaggtagttggagggatcgtacttctggcccacattgtgggagacgcgggccgccatcggaacggcggagacgcctgcggaaccgatcaggggattgaccggattcttgcgccagatgaggttcatcagcttggcggcgatcacgccgcccgcggtggctacgccgaaggcgacaatgcccagcagaatgatcagcagcgtttccttctgcaggaagcggtcaccctgcatcgtgaggcccacggaggtccccaggaagatggtgacgatgttgatgatttcattctgggaggcctgcaccaggcgttccgtcaccttgcactcgcgcaggaagttgcccagcatcagcatgccgatcagcggagaggcgtccggaatcagcaggatggtgacaatggttaccagcacggcgaagaacagtttttcactcttgctgaccgttcgcagggatttcatgcggatgacccgctccttcttcgtggtcagcagagccatgatgggcggctgtatcagcgggaccagggccatgtacgtatacgcggccacggctacggcgcccagcaggtgcggggccagcttcatcgtcaggaagatggaggtggggccgtcagcgccgccgatgatgccgatggaggcggattcattgggcgtgaagcccatgaacagggccatgaagaacgtggcggccacgcccacctgggccgcggcgcccagaagaagggtgcgcggtgcggcgagcagcgggccgaagtccgtcagggctcccacgcccaggaagatgatgggcgggaagatttcagccttgatgcccagcccgatccagtcgtacagacccccatggatggaggtgaccagtaattcctgggtgtgctggcccacggccacgtacttgcctgcggcggagaccaccaggggttccagcttctgcgtttccagattcaccggaacccggttgccttccgtgtcaaagtagttgactcccttctggcgcagaacggtggtgactccaccgttcgtgagcaggtacaccggatcgttggcgtccgcttccgtcacgttgtggaagtccttcaggttggggtccaccgtcaggctgtcgtcccccagaagggcggcgtcagccttggctttttcctgggattcccgcacgggcttgatctgggagacggtcagcgggctgccggggtaaacctgcatgggctgttccatgtttgccagatactgggcgcgcgcttcaggcgtggtcaggttggccggcaccttgacgggggcctgctggagcggggccacatgaacgcgcaggtagcccacgttgttgagggacgtggcggtcacttcccccgccttattagaggagatgacctgctggttcagctgggtgatgagcattccgttgtccggaatgttggcaattaatgcgccaaaggcaattggaaccatcagaagaggttcgtactgcttggctacacccaggtacaggagaagaacggcaatgccccacatccctaccatttgccatgatagggagaagatgcccatcccctgtaaaaaggtgattaatgaatcaaaaagactcatatggaataattattgtagcggtttttagtctgagtcggagtccggacctgtgttagggggaccggacggctcccgccgggattaaccaatcttggccagcgcctgtccttcctgaaccgtgtcgcccgcgcttacgcagaaagcggtgagcgtgccggaggcgggagcgtaaatgatggtgttcatcttcatggcttccagcgtcaggatctggtcaccggccttcacggcggtgccgggggcaacgtccagggaaacgactttgccggcgagcgggctgggcacgtctcctgcgccggcggcggccggggcgggggcgggcgtgggagccggagcgggcgccgcgacaggggcggaggctgcgggtgcgggagccggggctgcaacgggggccggagccggggcggaggtagtggaggagacctggtccaggagttctacggatacgtcaaataccttgccgtctacggtgatgcgaagtttcttcataataatgtatggtatggaatattaagttaaatgattcccgccgggggcgggggtaagggtgaataatgcagtggttcaatgactgggccggatgcggtgggaggcgaagatttccgccctgcctgcggccgcatagccggagcccggggattgcttgatttccacgatgcggtggctcatgccgtccaggcctgcgtccacggcggcggagatgacggccaccatttccggcgtgagctccgtcatggcggagtccacggctgcggagaggatggcgagcatttccggagtcatgcccggcttgcctgctgccgcaggggcggcggcaggcacaggagcgggagcggcggaggccgctgcggccttggctttggccttgttctggatggaagcggcaatggagccgctgatggtcagaatgacggccaggccacccaggcacatcatgaccaccaggatgccgacgatctggtagtccagattctccatgatgttggccatgccctgcgcaaaggcgagtgtcgtaagtaacatatgaatccgttaagatggatgttagagcggaatgttgccgtgcttcttggccggacgcacttccttcttgttcaggagggtgcgcagggcgaaggcgatcttggcgcgggtttcttccggattgatgacttccgtgatctggcccatgccggccgccacgtacgggttgtagaaggcctcccggtattcttccagaagttctccctggcgcttggccttttccgcggggtcttccacggctttcagctcgcggccgtaaagcaccggaacagcgccttccgcgcccatcacggcgatttccgcgccgggccaggcgaaaacggcgtcagcgcccaggtccttgcagcacatggcgatgtaggcgccgccgtaggctttgcgcatgatcagggtgaccttgggaaccgtggcctgggaataggcgaagatgagcttggcgccgtggcggatgatgccgccgcgttcctggttcttgccgggcaggaagccgggcacgtccaccaggttcaccaatgggatgttgaacgcgttgcagaagcggatgaagcgggcggccttgtcggaggagtcgatgtccaggcagccggccttcacgttgggctggttggcgatgatgccgaccaccacgccgcagacccggccgaagccgacgacgacgttcttggcgaagtccttgtgcacttccaggaaatccccgtcatccaccaggcggctgatgatgggctggacgtccaggggcgtgcggttgtcgccgggaatcaggtcgctcatgccttcgtccgcgctcaggtcaagcggggtgtccagcttgtggggcggttcttccgcgttgttggcgggaaggaaggaaaggagcttcttgaggatgtccatggcgtgcgcgtcgctgtccgccacgaagtggacgttgccggacacggaggcgtggatggccgcggagccgatgtcgtccatcgtgcacttttcatacgtgacctgttcaatcaccttgggaccggtgatgtacatgccggcgttgccggaattgcgcatgatgatgaagtccgtcagggcgggggaataggccgcgccgcctgcgcagggccccaggatcatggatatctgcggaaccacgccggaagccaacacgttgttgtaaaacacctgggcgtaaccggacagggccgccacgccttcctggaggcgcgcgccgccggagtcgttcaccgtcaccatcgggatgccggctttcagggcgtacttctgggcgtccgcaatcttcatggcgtgcatgtagccgagggagccgccctgggccaggaagtcggaggccgcgcaggcgaccggacgtccgttcacgaggccgaagccggaaacgacgccgtcgccggggatttccttcttgcccatgccgaagttgtggcagttgtggcgcacatgcatgccgatttccgagaaggtgccttcttcaaagaggtaccccatgcggtcgcgggccgtcatttcgcccttttcgtgtctcttgtcgatcttttcctgaccgccgctgaggatgaccttcttgcggcggctgttcagatcgtcaatcaatttgggatcaatagccattggtatagtggtatggtggattcggagaatgttacttgccgcatccgcaaccgccggggtgctggcagaattcggtcagcacgccgaaggtgcacttgggatgcaggaaggtgacctgcgtattgtgcgcgccggggacgggcgggtcgttcagcacggtaaggccggcttccttggcctgggagatgttgtcagcaatgtcgttggtcttgaaagcgatgtggtggatgccttcccctttcttctcgatggccttggcgatggcgctttccggagaggtgggttcgagcagttcgatgtggactccggcaacgtcaaacatggcgacgcgcaccttttgcgtgggcacttcctcaatgtggggctctccgagtccgagcgcatcacggtagtagggaacggtggcgtcaaggctcttgacggcgatgccgatatggtcaatttgttgaatcatatgcgtatgatggttgtagggaatgcaggtggaagcctgcaatacatcaggagccattaaagcggattttttttagatgtgaagcgaaaagcggaaaaatggcgaaatcgcgcccgctccgtttcacctgcttgattgccccggaagatgaggtatggtaggggcatgttcaagaggggattagccgtattgttcctgctggcgtcgtggttttccgccgcgtgtgcctatgagctgctgcccgcccatgtggccgtggtttacaacggaaaatccgagttgagccgccgcatggccagggagtatgcgcgggtgcgcggcgtgccggaagggaacctggtttccctggactgcccctcggccaacgagatttcccggaaggagtatgaagacctgatccgtgcgcccctgctgcggacggcgcgggagcagcggtggtgggtgccgtccggcattgcctccgcccccgtgatggaccggaagatttttgcgctggtgctgatggcggacctgccgatgaagatacgccatgaagcgcccgttccccctcccgggaaagatatcaaccagatgcagacggaccgcgccgccgtggactccgaactggcgctgctggcggtggacggttatgagaggaaggcctgggtaggaaacccctattttgacaggaaggaggattttgtgggctccggcctgcccacgttcctggtgtgccgcctggacggcctgacggcggatacctgcctgcggctggtcacggaacctgcggaggtggagaagaagggcctgtgggggtgggcggtggtggaccggggcggcccctacgcccagggggaccagtggctggacgccgtgttccgccgcgtgcgggaagcgggcatccccgtttacctggatgactggccccagactcttccggagaaatttccgctgagccgggacacggcgctttactgcggctggtacaccgggaatgcgaacggtccgtttacggacccaaccttccgtttccggcccggagcggtcgccatgcacctgcattccttcagcgcctccgatttcaagattcccggcagggggtggagttccgccctgctggaaaagggggcggacgtgacggtagggaacgtgtatgaaccgttcctgggcgcgtgccaccgctttgacatttttgcggaccgcctgctggacggctataccgtggcggaagcctcctggatgagcatgcccgtactgtcctggcagggggtggtgttcggggaccccctctaccgtccgtacgcccgcatgaaggacatggacgtgaagccgacggaagaggaccgctatttccagggctggtgggcttcctccgtacagttcggggaccgctggcgggaccgttccgcgcgcctgctggaatccgcccggaaggcaccctcctcctgcctttatgaagcgctggcgctggaatacctgtaccggaaggagccggcacgggccggggagctggttttctccgcccttgacggcgcgccggacgcccgcacccgcgcccgtcttctgctggagtccctgctggcggaccgcgcccagggcggggacaaggccttcctgctgcggatggacagcgtccgcgccctcatgtcttcctccgcctttctcccggcgctggaggagtggcatgcaaggatagctccgccgccgcccccgcctaaaaaataaaattaaggccgtacggcaaatttggattgccttttaggggattatggcccatattctgcgtcccgtaagttttccttttactgatattcaccagcaatagataacacaagatgaacattatcaacaaaatcgagcaagagcaactcaaggcggatgtgaccccatttaacgtaggtgataccatcaaggttcacactcgtgttattgaaggcggcaaggaacgtatccagattttccagggcatcgtgatcgccaagcgcggttccggcatcaatgaagctttcacggtccgcaagatttcctacggtgaaggcgtggagcgcgtgttccccctgcacaccccccgcatcgccaagattgaagtcgtgaaccgcggcaaggtccgccgtgccaagcttcactacctccgcggccgtatcggcaaggacgccatgatcgtgaagtccgccaaccggtaatcggaaaaattgctatttttgctggcccggcccgccgtgaggcgaggccgggttttctatgcccggaaggttttattccaccccggaggaagaaggggccggacgggaaaggaaggcgtgaaaaaattttcgtgaccccccctgtgagggcaacacggtttttcccggtgaaagttccggaaaggggagagaggctgaaagaaagccggcaagaaaaaggaacgggatggaacaagccctccggcttttccgtttcttccggcggggctttgccggggggagggagctaatcaggaaggcaggcggttggccagcctcttttgcaggaaatagaagtggagcatcatcagcacggaacttgccaggctcaccaggaaggccgttccgttgtacatgatgacggggcgcaccatgccgttcagcagggcttccagctcccggtccagcgcaagcacgttttccgggctttcttccgcccatgcccggagcgtctccgagaaacggaacaggggctggaacagcgtatacaggaagatgagcagggaacccggcacgctgacggcccaggccagccatatccagccttttccgcgtgaagggccggggaaggagagggccttgttgacatccagcatggcttgaaggggcatccagatattgcccacggggaggaagaaggaaaggacgcagagcaggggagaggagcgcatggcttccttcttcaccgtttccgcattctgcgccagccggtaaaccagcatcagccagcagaccaccagcccggccatggacaggtaaaacaggccgccgtccagcgtaaacggagcggcggagcctgcatccgccctggcaagggagagggaaagggaggtgcggtccccttcctggagttccttcatggtttgagccagcgtttccgagatggcttgctgaatcaggggaagatcgtggaaaagcagatagaaggtgcccccggccagcgtcagggcaaacaggcacaggaggaacaagaggacgccgagcttccggaggggcgggattccggctgaaaacggttccgcaggcattattcttccgcaggtgcgggggccggtgtttccgccgcttcttccgggccgtatgcctccacttccgtcagcgccagcggatgggccggatcggtggattccacgcgcagggcgcgcgccttgaccggagcttccagcttccaggtggtgacgttggtggatttttcagagggtgtggtgttgaaggttttttccgccagcacgttcttgtcattgtcgtacagaatcaccttgaattcctccatggtgcccagcagagtcaggttggctggcgtgtaaataaccactttttctatggtgcggttggtctccttgccgaagtcgatgccgaaccaggcggtttttccttccgccacgccggtggcgctgatggaaacgtcggaaagctcggagctggtattgccgtccacggccttttccggaccgtaggcgcccagcatgttgcggttggagctctggcgcaccttgacgccgggctgaaggctccagttgactttgccgggttcggcggagggtttgggagctgcaggcacgggttccggatgcgggagcggggcaggtgcgggaaccgcaggggccggagtggtgttttccgcgacggccggggcagagggtgcaggcgttgccggagcatggcggcgcgcttccctgttcgcttttctcgccgcatccgccttcgcgttgttttccttctgcacctgttcgttgtagtcattgcgcattctgacgacgtccttcttgtacaggatgcaggtgtaggtcagcacaatgcccacgatcagggccgggataaggtagtagtaaacattggtctgccctttctgcatattcatggcggggacgggcgttgaggacggccggggaggaatggctgccgcgtttcttcccgtggggctggcgatggccttgtccaggtccgtgataaagtcccccaggttccggtagcgttcgcgggtgtccggattgatggcccgggagaccacggcgtccacggcgtcgctgcacttgatcagtgtggagggcatggcgaagcccgcttccatcggcgtcttgcgggtcagcaggatgtagagcgtcagccccagggcgtaaatgtccatgcccggcgtgaaggcggcttccgccccggtgacccattccggagaggcgaagtcccccatgtctaccgggggctgcgcgggataaatgttgatgggcagcagcagggcgtctccgccgtccgcgcgcagggaaatcagtttgggcgtgatgccgccgtgaaagatgtttttccggtgcagcgtcagcaggccttccgccatgttccgcaccaggttgagcgccgcctggggggatatctgggggagggtttccaggtccgccaggcgcggatagggggagtgttcggaaatgatgaaggtgaacggtcctgcctgtcccacttcgtaaacgcgcagaaggccctggtgcgcctgttccacaatggtgagggagcggacgatgaattccggatcccagccgaagactccggcttcctccgtgggaaccacccgcagcatgacgggagcgaaattggatttcagggtggcggtgaaaatttgctgggggcctttggccccgacaagctggatgttttccagctgggggaagagggcggaaatctggtccatggaaagggaatcgtcggcaggcatggaaaagggaggtggaatagtatcggcaaacagtctaccttaaaatccttgccggaagcaactctataagcgggcatattttgctggcgggatgtcctgacgctgaacggaaaccgctcgtgccgggccggaacggccttttccgggcggggcggacgctctcctttgaagaaggcgtcccgaggggccgttctttccgtatccatacggttgacgggcctgttccttccgctggcgcaatggtttttcctgacggggaagtttgttggaaaagccggatgccccctccgttttcaggaagggttgtttcctcttcattccgtggccggaaggcggcctttttccctgccgtccggttaaaacaggagaggcagaagccggaaggccgaaccggcaaattcagcggggagtttgtgtttgtccacgattgcccgaacctcctttttactcaggaaccgttcttcctttttcgctttgaacgcggtccagtcaaccatgatggatgacaggagctgggacaggaaatcatgcatgcgaaagagcggggtatttccagaggcccggcggggagccgcattcctgcattacggccttttaaggataatgggtggggcggggttggtctgccataccggggtggcggcccgtgcgtccgcttcctccagcgcctggtgccccttgaccttggccaagtgctcccggaggatgcgccgcagttccacggcggcggccgggtcatcctgcacgctgtgcccggacgggacgattttttcactggcgctccagtccagatgggaggagcggtacttgaccacgccgtcggaggagtggggcgtatcgttcctgcccctgtccccgatgatggaatggacgggaacgttcgggtccccgcgcagctccgacatgtacttgaccagggaggagttcggggaaagctggcggatgctggtgagttcgtccttcagctgcaggggattgagcaggaacatgccgcggctgagggtggcgatgcgggtgacttcctccagcatgtccgccgggaggtcgatcaggcgctggcccagccgccctatccagttgtccgcaaaggtggagccgcggtgcggggtggccatgtacacgatgcgcgtgacgcccctggcgggggagaagataaaattgttctggagctgttcaagcatgggctcgtcacagtgcaggggttccagcccggttttccagttctccagcgtcatgtctgcaaaggtttccgggggaagctcaaagaggcccttcatcagcgtccagggcttggtggagttgttgaagcgggtgatgaggccgcccatggagtgccccaccatgacgatgttgttcatttccctggaggcgccgcggggattgtattcctgcatgagttcctccagggccttccgctgcctgttggccggaatggtccaggccaggccggacggatagccgaagaaccagaactggtagttttcccggatgacgggatccaccagaaggcggttggtcaggttggcaaaggtggcggggccggacatcaggccgtgggtgaagaccacgggaattttccgggggtcatagggttcggaaaaataaagccccatcgtattgatggcctttttgggacggaacgcgcccagcagttccgttccgtccgcgtcggaaagcttccagaaaagggcgatgggaacggagaagttggccgccaggggctgacgcaccttgtttttgccgatgaagacgtgctcattcatcagacggggaatggtgcggagggtgggcttcccgtccaccatgcggtcaaagtccaggatggccgtcagcgtgtgcacgttcccgttgtccttgagcacgttggcatggggctgggagacgccctggggcgccaggcccgccaggggaatgcccattccctccacggttacgctttcccgcaggcggaaggtggggtccacttcgtcggacatgaagatggcctcgtagaaccaggggttgctgtccttggcgtaaggagatttttcaatgatgaaggggaggctttgacgcttcttctcattcatgccgccctcccgtttggcctctttcaggtgggaggccagcttccggatgcatgcgttgtatttttttctggcttccggccattccctgctgcggtggggagaggagaggatgagccatgcggcctgggcttcccggatggctgcggcgtcatcctggtaatgggcgtacgccctttcctgctgctggtggtgcagggaacagccggaaaggcccatgagcaggcctagaagaagggcggaagccgttttcatgatgaacaaggagagaagggggcggagaggtcaggagagcatgtccagagcccggttcatggacttgaggaaggtctgaacttcctcttccgtattgtacagggcaaaggaggcgcgggtggttcccgtggttcccagggcgcacatgagaggctggcagcaatggtgcccggtgcgcacggcaatgcccatctggtccagcagggtgcccaggtcgtaatggtggatgccttccgccaggacggagaccacggcgctgtgcggcacgtccggggccagcacggtcaggcgcggcatggccttgaggccttccacggccatgtccgtcagtttctgttcatgggcggcgatgttgtccagccccagtccggagacgtagcggatggccgccgccagacctaccgctccgccaatgttgggcgtcccagcctcatatttgaaagggatgtcgttgtagacggttttttcaaaggtgacttccttgatcatctccccgccgcccatccacggcggcagcttttccagcagctccctttttccccacagcgcgccgatgccggtgggagcatacagcttgtggccggaaaaggcgtacaggtcgcatcccagttcctgaacgtccacgttcatgtgggagacggcctgggcgccgtcaatcagcacaatggtgtccggcctgttttccctggcaagcgcggtgatctcctgcacgggattgattgttccgagcgtgttggagacgtggcccacggccacgatgcgggtgcggggggaaagcaggttccggtaggcctccatatccagcgtctggcccggagtcagcgggactaccttgaggaccgcgcccgtgcgttcgcagagcatttgccaggggacgatgttggagtggtgctcacaggcggtcaggataacttcgtcccccggcttgaccatgccggacctggcgatggtgtctgccgccaggttgatgcccatggtgcagccggaggtgaacaggacttccgccgtttccggcgcgttgatgaaccgggccaccgtttcccgcgactcttcatgcgcctccgtggcaagctggctcaggtagtgggagccgcggtgcacgttggcgttctgcgtttcataataattccgggtggcatccaggacggccaggggcttctgcgtggtggccgcattgtccaggtaaatgagcggtttgccgtgcacgctggtttccaggatgggaaactgcgggcggatggttgctgtgtcaagcatggctatggtacgagtgagggttctttgcgcaattcgtcccagcccccttccagaatgaagatgggcgcgcggatgccgtattccggctttttcagttcattggctacggctgcgctggaggtgcagtccctgctgcaaaagatgacgatgcagcagcccttgtcttccgccgtcatcagggcttccatggcgttggccaggagttcctggtaattggcgtccgccgggcggatggggtagacgggggcctgcgtgatagtgtggcgttcaaagtcgtcctgttttctggcgtctatccagatgacttttcccggccattccttcagcacctgggccaggcacacgtgcccctcctccagcgtctccggattgcagggcggcgtgcggaacggctggatgacgcgcaggtccagcgcagcgatgcccacggccagcaggaatacggccagcaggagcttcagggcggtggaaagggcgtctctcatgtggggaaggtcagttttccttgatggtcaggaaccccatctggcgcttgtagcgcggcacggtggaatccgtgcgcacccagatggtgttgaaggccggcttggccgtggacctgggagtgacgatgattttgtattccctgcctttcttcacggtcacgggctcatagtcaaaggcgtccccggtcaggtccaccgtggtcaggttgacgggcagttccttggagatggtgattttaatggtcttgggggcaggggcttctcccctggtccattccagcttgcggggttccatccggatgatgtccgggatttgcgcgcgtatcaccagcttgtaggcggagccgttggcgtgcaccgtcatgtccttgtccacggtgccggaaaagttgccggtcttcatcacggcgctgatgacgccggattcccccggagcgtacgtcagcttgttatccttcgccccggcggtggtgcagtcgcaggagacatggattttgctgatcgtgacgggaacgccggaggtattggtgaaggggaaggaggccgtgatgctgtcctggtccggagccacctttaccggaaccaccgtttccttgaaggacagttcgtttttgccggaggcgaggcccccgcacagcagcagtcctgacagaataatggtccggatggtcatggtcgtttcaggatggtttttcctctttcttcctggcggagaagatgctggcgatgaagaagatgatcgccgccacgaagatgcaggagtccgccacgttgaaggcgggccagcggtagttgaagaggggaatggtgacgtcaatgaagtccaccacgtagccgttcatgagcttcgtgaagaagccgtgcggctgttcgtagggaatcaggaagccctgcatcaggcggtccgtcaggttgcccgccaccccggccagcagcagcacataggccagcttgagccataccgtatggaaaaagtttttccggtagagcacgaccagggccacgatggcgagcacgggaatcgccaggaacaggtagctggaccatgccgttccgttgcccagcccgaaggccacgcccgtgttgtgcacgcgggtgatattcacggcgccgtccaggaaggaaatgggttccagctccctcagcctgttcagggcgtccaccgtgttcgggttcaggtcctggaactgcgccatgtccgccgccggtatgtgcccgttcgtggcgaagtccagcgtgccgtccgcattgacgtggtggaagcccggaaagtccggcaggtaggcgtacttgtggactttctcgttcaggtagttcagcgggaagcggtggacgatccacagcttgcttgcctggtccagtacatacagccctacgcccagcaggctccaccagagccagccgggaggcgttttcttatgggggccgggttccttttccgtctgggtatccataaaagatcggggaatggtttcagttcaggaaaggacttccgagcagcgttcgcacacgtcgctgccgtccgccgcgggttcataccggcggcagcgcgggcacatggcgtgttccgttttggcggcggtggccgccaggtccggaccgctcttcacgtccaggtctgcaatgatgaagaattctgtggcaaaggcgcggtcttccagcagcgccaccacgtcctcgctttcattcgtgggaacggtgagggtgatggaggcctcattgttcttggagaacgccttggccttcacctgctcttcaatggctacctggatgacggacttaatttcctggaggcgggagatggcggaggaggcctcctgggtgtcgtactccggcatcggcgcggggaagtcctgctcgtgcacgctgccttcatacccggcgtattcccaggcttcatccgccgtgaagaccaggatgggggccagcaggcggcacagggccttgaagacgatggtcatggccgtctgggtggcgcggcggcgcacggaggtgacgtcgtcgcagtacaggcggtccttcgtggtgtccacgtacagggcggaaaggtcgctggtgcagaactggttgatgacgctgaacgccttgcggaagtcataggcttcataggctttcagcgtttccttgatgacggcgttcaggcgttccagaatccagcggtccaggatgggcatgtgttccggggcgaccgcctgcgtggcgaagtcaaacccgctgatgttgcccagcaggatgcgcagggtgttgcgcagccgtcggtagggctccgtgacctgcttgaagaggtcttccccgaaggggacttcattctgccagtccacggaggcggcccacaggcgcacgatgtccgcgccgtacttgtcgtagtagtaggcggcgtcaatgggcttgccgctcttggcgtcggacttggaggtctttttcccggtgtccttgtccaccacgaagccgtgggtcatcacggccttgtacggagccttgccgcgccaggcgacggaaagcatcagggaactctggaaccagccgcggtgctggtccgtggcttccaggtacaggtccgccggggcgtccagcccggggcgggcgtccatgacggccatgtgggaacagccggaatcgatccagacgtccagcgtatccttgcccttcttccaggtcttcggcaggccgaggcgttcgcacaggtcttcatcggaaagctcaaaccagatgttggagccgtgggcctccaccatatccgcgatcttgcggaccagggcggcgtccagaacggcctttccgtcttcgtcaaagaagacgggcaggggcacgccccaggtgcgctggcgggagatgcaccagtccgggcgcgcctccacggtgccgtaaatgcggttgcggccccaggcgggcagccactgcaccttgtctatttcttccagggcctgcggtcgcagcctgtccatggagatgaagaactgctccacggcgcggaagatgatgggcgtcttggaacgccagcagtgcgggtactggtggcggtattcctccacgccgaaaaggttgccgtccttctccagcatggagatgatgtccttgttggcgtcaaagacgtgcttgcccaccagggagggaacgcccacttcttccgtgtacttgccgtcgtcgtccacgggggaaaggacgggcagcccgtactggcggcctacgttgtagtcgtccgccccgtggccgggagcgatgtgcacggcgccggtgccggtgtccgtggttacgaagtccgccaggatgatttttgacgtgcggggaaggaaggggtgccgggcctcgcagttttccagctcggcgcccttgaactcgcggatggtttccgccagggcccagcccgtcttctgcgcgaaggcgtccagcaggtctttcaggatgatgagggtttccgtctggccgtccttcatgaacttgccggccacatacgtgaagcgcggatgcagggcgatgcccacgttggcaggcaatgtccacggggtagtggtccagatcaccatggaggccttcaggtccaggggattgtccagcagagggaagcgcacgaacacggaggagctgatcttctccttgtagtcgatttccgcttccgccagcgcggtataggccccgtaggaccactggacgggcttgcggctctggtagaccgcgccgtcttccaccagcttggcgaacacgcgcagaatgttggcttcatacgccggcttcatggtcaggtagggatgctcccagtcaccgaaaacgcccaggcggcggaaggaagtccgttggatgtcaatgaagccttcggcaaattccgcgcagcggcggcggatttcagccgcgtccaggtcacgggccttctgcaccaccttgaattcgatggggaggccgtggcagtcccagcccggaacgtagggggcggcgtagccggccatggtcttggacttcaggacgaggtccttgagaatcttgttcagggcggtccccatgtgcacgtctccgttggcaaagggagggccgtcgtgaaggaggaaacggggtgcgccctgttctatcctgcgggacaaaattcgttcgtacagcccggtgtcttcccactttttcaggcgtactggttcgtttttcgtcaggtcccctctcatggggaagccggtctccggcaacaggatggtgtctttataattcttttcgggcgcactcatgcccgaaaaaggtagcaccgggcccgtttccggtcaaccctgcggtgcggcacaaatcagggcctagcgcattcattcccgccgtgttccgggggggcgcccgtaccggaaggcgcattcccgcaggcaggagccggggaggggagaattccccgttccgcgagccattgttccgcggcctccggccatttgtccgtgggctggccgcgcttctccatgccgtacccatgccctccggagggataaaaatgcaggctggagggaacgcccttttcccggcaggcctgttccatcagcctgctgttggcgctggctacgccgtcgtccagcgcgtggacgaggaacacgggcggcgtctgcggcgtcacctgccgttccgcggaacacagctccgccagatccgcgccgggggcaggccccagaatcctgctgcgggtgcccccgtgggtggttttggggtccatggtgatgacggggtagatgagcagggagaaatccggccgggcggaaacgcttttcagtgggttttccgcttcttccggcagggggcggttccaaagcgtggaagccatggcagccagatggccgcctgcggaaaagcccatgacgccgatgcggtgcgggtcaacccccagcgcggaggcatgccggcgcgttacgcgcagagcctgccgggcgtccagcagagggcccggaaacctgccgacggcatcattgctcccggaaacgcggtacttcacgacgacgcccaccatgccgtgctccgccgcccagcgggcgatatggccgccttccttttcaatggcctggatggcatagcccccgcccggaaaaatgcacagggccgcgcgcctgtcctgcggcttccatccggcgggaaagtagagctgcatctgcgcttcccccacgtccgtaatatgtccgggggatacttgtttttcctccaggtccgccgccttgagccccagggaaatccacccggaatgaaaggctccgtgttccgcgggcggctggagggcctccagcacggacggtttaaacggcgcggctccggcgtggccgtgagggaaggccaggaaaagggcgggaaggaggaaggcaagcttcatgctcatggtttattggcgagtgagatgacgagttgggaaaggccctgcaccacttccgcaaactggggataatccagcttttcagccgtgtcgctggtttcatggtagtcgtcgcagcggaggaaggccgtgtccgtggcggcaaaggagggaatgccctccttcatgtatccccagtcgtcggaccaggaaacgccgcgggtgtaatacgggaacacggcggaacggaccggaaagcggctcaaagcggcaaattcctccgcgcaggagcgggccagcttgcggcccgtgttggtggacatgaaggccacgtagtcgcagcggtccggcagcccggccaatccggcaaccacggctgactggcgttttttgttcacccgaggggaatagcagcccagcgtttccagggcaatcatgccgatgattctgtccttgcccggatggcgggcgacggatttggcgtgcaccacgctgcccatggagggcgtctggtaaaagggcggctcttcattggcataagccaccaggcacacgtcgtgcagggtgggagtggccgtcagggcgcgcgccgtttccagcagggcggccacgccggaagcgttgtcattggcgcccggcgttccggtacgggcgggtctggcgggaccgtggtcgtgccagttgtccatgcctaccttggtatcgtaatgcgcgcctacgatgagcattctggggcggagggatgttccctttttggtggcgatgagattgtacgccgtcctgtccttcacggcgccgaattccccggagggcggaatgttcacggcctggcgcgtgacggcatagcccatgtccgccagggttttttcaatgtagcgggcggatcgctccatggtgccgggtttgtagacgttgcgttccccgatggaatccgccagatggaacacgtgtgctttcaggagtgtttccgtctggtccgtgtccggaatttctccgcttccgcagggggaaaaaagcttggagcaggagccgagggcgacgcaggccgccgcggtgagcagcccgtacttgagagtcctggatgagacattcatgggggagttggagggtggggagaggaaggaatgctagtggggaagcggcggaaaatcaagccgcgccgtttccccctttttcatggccagatcctttttcctgccctggtgcatgaaccggaacctgccgggacgggtggcggtggctgtggcctgcaccctgccgttttgccaggacaggtccaccttcagccctccccgggtgcgcagccccgttgcggaacccttcttccaatcgtccgccagggccggagccagcaggataacctggaagccgtcctgcgtgatctggctctgaatcaggcactgggccacgccggaggcaaagccgaagttgccgtcgatctggaacgggggatgcaggtcgaaaaggttggaattgatgtaatgcctcagcatggcgtacatcctgtcctccgcggcgtttccgtcgccaagggcggcataaaggttgatgagccatgcggtgctccagccggtcctgatgccgttgttccccttgtccgcgtacttgcgccggaaatcggcggacttgcgcacggcggcggcatattcaggcgtattgagcacgtcccattccgtgccgggaaacaagccgtaaagatggctgatatggcgatggcccttctgcatttcttcaaaaggctgcctccattccagcaccctcccgtcggagccaatggcaggctggggaatctttttgaggaattgaacggctttgaccagagtaggcgtccgtatgcccagctctccgcaggcgtaaatgtaattgcggagggactccctgcccagaagctggtcatgagaagtcccgttggaaacgtaggaaagcacgttggggcctgtgccgtccggcgcgtaaaatccggtttccggggagacgccgggcccggaaaggtaatgcccctggtcgtcctcctcaaaccaggacatgatgaaacgcgcgttggattccagaatgggcagggacttcttcaggtcttccctgtctccggtgaagcggtagctgtccaccaggtgggcgcacgcccacgccccgttcatgaggctggccccccattccgggttatttcctgaaaaataggtgcgtttccagcagtccgtgtaatggccgaagcagaatccgtcccgtttgatgaagcgcgcaaattcctctccatgagggcgcaggctgcggacgaattcaagatagggctgctggaattcccccaggccggtggcgtgggagggccactggttcatctggctgttgatgttcaggaaatagcagcccatccacgccgcccgcagctccggattccacaatccctgcaagccgcagggaagctgccccggcctggtgtggacaatcgtgcaaaagcggccgaactggaaaagctgttccagaaggtccggatccttttccccttgtttgacccgttccagccgctcaggggtggtcatggcggaaacctcgggaggggaatcccccaggtccacctggcagcgcatcatgagacgggaaaaataatcttccgtttccgccgccagttttttccagccttttttctgcgccttcgccagaatttgcctgttcttgtctgccagggaatgggtcaggggctcttccggcttccggatattgtaatccgtggaggtggaggagagcaccagcacttcccgcgcggaatccagaacgaccgttttccccttgcgggatatggcggcgccgggagccaggatgaccaccctgttttcaaaccgggtgcccccgttgcttccctgtcccgtcaggacccagccatcgggccgtgcgtcaatccgggcggacgggtccggatgctgcaagtccagcgcaacgcggcacccggccggaagggtgcaggtgatgcggtaagcggcgcaatcgctggacggagccgccaggatttccgtggacaattctcccgtgccgaattgaacgcgggtggaagccttgccccgctgcatgtccagcgtgcgccggtaggaggcaggggcgggaagcccctggaattccacctggaggagacctccctgctggtaatcccccgcgatgctgccggggggaaggatatccttccggaacacctggtccgcgctccggtattttccttccttgcaaagttcgcgcgccttgtccagggcctccgcggcgccttccttcatctggaaatttttcttcgcgaagatgcttccttcattgaaaacgacgatttccttcggaaaaacgccaaaagaaagaatgcccagccttccgttgcccgtgccgtagccatccgtccagatccgtgcaggttcggtggaagtggcctgcatgggggcgggagcggcccggagggggacggccgccgcaagaaggcaggggaggaagaaatatttcaaggttgtagagacagtcatgagagaggatgggtgtcccgtaaaagaggaggttgatgtaaaaagccgctattttttaaaccggcttccagtaccggcataaatgactgcaaacgctatgctgcccaccagaaggcacagggagacggacaggagcacggagttctggaggatgatgctgatgagccacagcagcatggcgaaggccaggcagtacatgagctttcccatgaaccggcacagcgcgcgttcatcgtactgcttcttctgctccttgctcatcatattgtagcctgcgatgaggaaggaacattttcccatggaaagaatgactccaagaatgatgaagcctgccatcatggcgacgggtatcagaataggtgcatccataagccggaaaaatgggggaaatgaaagtccgcggcaactcgcccggataagtacgtagagtggtctttaagggaatacgttagggaaatggttttttttcagcggaagaaaaagcgtctgttttttctgccggaagctttcgcaaggcagcgccgcggcctgttttttgcgtcaaaacaggaagtagcaggagcagaaccaggcgatgatgagcaggccgcaggtgaattccagcagcagcccggtgagcattcccagcgccgcgccggagcctgccttgaaggcggccatgatgtcttttctggcaaagatgagttccgccagcagcgcccccaggaacggcatgaacagaaggcccacgatgggggtgaaaaggatgccgcccaccacggcgccgatgatggctccccagatgccggcggcggtgctgccgaattttttggcccccatgcctccggagagcttgtcaatgaccaggccgcccgcaaccatcagcgccaggacggtccattcccaccacgccaggtgcctgctgcccatcactccctgccagatgcaccctgccgcaatgataatgatgccggggagcatgggaataagcgtgccgatcagccccatgccgaacagcagcagggtgacgcaccagacgagggtttctgaaaggacgggtggcatgcctcccttcttatcaggaagagaggcgtgtggcaaggcttctgcccggcttgcggatgacggaaaaaaagggggaagtgcatggattgctgttgcggtttttgcgggcgtggtatggaatggcgcccatgactttcaccggttcttttctgcgtggctgcatggtgtgctcctgcgctctttctatgggtgttatgcccgtggtggccgcgtctcccgcggctgattccgccgctgtgcagaagctggctcattccctgaaagcccgtgtgggcatggccgcagtgatgctggacacgggggaggccgtggcggtgggtgatgagactgcctatcccatgcagagcgtcttcaaattcgtgctggccctgtccgtgctcaagcgggtggaccagggagccctgaatctggaacagatcatccatatacgcccggagcagttggtaaaagacacgtggagtcccctgcgggagcgctttccccagggcggtgatttttctttaaaggaactgttgcgcgtgaccgttcaggagagcgacaacaacacgtgcgacctcctgtttgccctcatcggcgggacggagaccgtgcagaaggatttgaaggaatggggcatcagcggcatcaacgtccggtttacggaagacgagatgctgcggaatcatgacttgcagtatgccaactcgagccgtccgtcagccatgaatgccctgctgcgcgcgtttgacgagggtaagatactgaacaaggacacgcagcggcttctctgggacatgatggccggctgcgctacggggactacgcgcctgaaagggaagctgccgcaggattatgtggtggcgcacaagaccggatcgggcttcaccactccggagggcgtgatcaccgccgtcaatgacgtcggcatcatcgttcttcccaatgggcggaaaatggcggtctccgtgttcgtcatggattcaaaggattccgctcccgcctgtgagaaggtgatcgcctccatggcccgctggctgtgcacggaatggcaggccgccgccgccaagtagcggacggccttccccggaacatgttttaagcttggaaagggggccgctatcaggcaaggtgtgccgcgttattcatgaagaacctattgagccggtacatcagcctgagcctggcgctgcggtatttgaacccgctgcggactttcttttccatcattaccctgatctgcctgctgggcgtatcgctgggggtgatggtgcttatcgtcgtgctgtccgtcatgggcggcctccagaaggaaatccaggggaacctgtttgcgcactccccgcacgtccaggtgtgctaccggaatgacttcggcgtgagggaggtgattccggactggatggaattgagcgagaagctcaagcacgttcccggagtccagtccacgtatgccctgatagaagactacgcgctggtagacgtgcagggacggcagaggccctgctttttccgggccatcgatacggaaaacgccgcccagctggaagatttgaagcacctggtggtggccggcaatgcggagctggacatgggggaaaaggctgtggtttcctccatcgtggcggagaacatggggctgaacgtgggggatgtggtccgggtgtacactacccgcaatttccaggaaatttcccacgcctaccagcagacggaactgccggtgctggcggaaaagaacgcccgggaactcaatgatttgaaggagtggggcaagtccctgaaaagggagggagagcgtgaaacggccggcaaggcctccgtggacaaggtattcaccctgctcaacgggctgctgtccgtcccccgcagggatgcggagcgctccagcctgatggatttgcttgccgtgctgaatgacggggaagccgtggacaacggcagggtggccttcccggaaggcacgcggaaggaatgggaaaccattctgggcggcttcaaggcggggcagaggaatgaggcggacatggaatgcttccgcaagatcagggagctggtcatgccgaaggatctggaggtgatcggcatttaccgggcctcccagcatacgcccagcccggatctcttcattccgctggtcatcggccaggaattgctgggttatgaggatgacgtggtgcaggccgtggccctgcgcgtgaacgacccctaccatgtggaaacgatgctggcccccgtgatgcaggcgctggaaaaggaaaagccctcttccgcgtggacgctggaaacctggcatgaccgctttaacgcgtggtttgaactcatgcagaaggagcgcatgatgatgagctttgtgctctccttcatctccctgatttccgccttctgcattatggcggtgatgtttaccgtttccatccagaggaaaaaggaaatcgccgtgatgaaggccctgggcgccacgccgttccaggtggtgcgcgttttcttgtggcagggggtcatcatcggctttgtgggagctctcctgggcgtgggcctgggactgctggtgctggaataccgcatgcagatccagggctttctggcgggaataggctttgacccgttccccgtggctttccacggcacggcgaacatcccggtggtgattgactgggcggagctggcgtggcaggcggtgaaagccttcgtcatggtcgtggtggcctccatcattccggccctgatcacggcgcgccaggacccggcccgctccctgcgcagcatgtaacaggaaaccgcccatggatatttactggattcaggatcatgaaaaaaagggccccctgccggaggtggaggtcatctccatgctggaggcgggcctcattccggaaaccgcccgggcgtggcatgccggatgcgcggaatgggtgcgcatccatgacctgccggcgctgaaggaaatgttcgccgttcgcaaggaagaggaagaacggcgtaatgtggaggaagatgtgccggaggatgaagcggcgcaagatgccgccgccggcaccacggacgcggattccctgccggaagaagaggaaacggctgtggaggaaggcacgcctctggtagttccctacccgtacgtccgttttctgggaagaatggcggacgtgatgatgcacatgacgctgtatctggccgtgctcaggatcttcggcctggccttcagccccgattttcttcccggttcctatgaagccctcctttacctctgtctcccgatggtgctcattgaaaccgcctttctgggaacgctgggcaccactccggggaaagccatgctgggcgtttccgtcagggactaccgggggaagcgcctttccttctccacggcgttccggcgctccctgttcgtcatggtgctggggctgggctgctttgccccctccctgatgctgctggccctgttcttttcctggtggtgggtgcgccgcttcggcttcactccctgggacaggaagctgggcaccacggacgtgctgaacgactcactcaccctccgcaaggtggtgatgacgctggtgcttgtcatcctgtgcctccaggtcatgtacgtgctgctgattccctggctgccggaaatggaggcgtacatgggcgcctccgggcaaatgtgacaaaaagaccggccgcgcgggatttagccttttaatcacctgaatttgtttcatacttgtcccagccatgccagaaatacacccaacggcagtagtgcatcctgctgcggagatcgcggatgatgttaaaatcggtcccttttgcgttgtcggagaacatgtaaagctgggcccgggctgcgtgctgcacagccatgtggtcattgaaggaccttccaccttcggaagcggcaacgaattttttccgttttccgtcctcggcctgaaaagccaggatttgaaatacaagggggaaccgacctatctggaagtgggggacaacaacgtcttccgtgaaaacgccaccatcaaccgggctacggacatcggcggcacgacgcggatagggaataacaacctcttcctggtgtcctgccacgccgggcatgactgccagatcggcaatcatgtgattttctccggcttcgccactgccgccggccacgttacggtgggggattacgccattctggcgggatgctgcgccgtgcaccaattcgtcagcatcggggagcactccatggtgggcgcgatggcccgcgtgagccaggacgtgctgccgtacaccattgtggaaggccatccggccgtgacgcgctccgtcaactccatcggcatgcagaggcgcggattttccgaggaagacctgcgggccgtacgcatgtgctacaaaaagcttttcgtcaacaagaagctgaccgttcatgaagcgctggaagagctccggaactcggactacgcggaaaatgcctgtctgaaaagaatcgtcaagttcgtggaaacttccgaacggggcttctgccactgaggccatgaaaacaggttttgtctttgacctagacggaacgctggtggactccattcccggcatcgcccgcggcctgaacctggccttgaagtccctggggtatccggagcactccgtgaatgccatccggggaatggtgggcaggggcgcgcgggaactctgcctggcttccctgaaaggctgtttcaacggagaagtgccggaggaagcctttgaagcggtgcaccggggattcatgcgggaatacccccatacctggcaggacggcacggtgccgtacccaggcatccgtgaaatgctgctggaactggccgctgcaggccaccccctgggcgttctgtccaacaagcctcatgtggtcacgggaccgctggtgcgccatatcctgccagaggtgcccttccgggaggtgatgggcttttccgaacgctttccgcgcaagccggagcctgattccctgctgtccatcgtccgttcctggggaatggagccggagcaggtgtgcatggtgggggattcagcccacgacggcaacacggccgtgaacgccggaacgcggcttgttctggtagggtggggctacagttcccgcgccgcgctggacgccttccgtgtgccggtgtgcgctactgtggcggaactgtccgcccggctgcgggatgaagacagcctgccgtttcccgtttccgcccgccggttgtcctgaaggctctccttgccggagtcgcacagagccatggctgccgtggtgttgcagcactttcaggacggaatgtccggaatgtctgcggattttgcctggagggtgatatcttccagattggcggggaggtccttcgtggaggttacgcccagattcttcaatttctgcgcccggggaatgaatcggtgctcaaaggaggaaacggtcttgttatactgggccactgcctggttcaggctcttgcccagggaggaaaaatggccggtgaggatggagcaggtattgaacaggtccgcccccgcttccgagattttcttggcgttgtccgccagttgctcctgcttccagccgtaggcgacggctttcagcagggcgatcagggtggagggtgtggaaaggatcaccttgttctccgcgccgaattcaatcagggaggggtccgcttccagggccgcctggaaaaaggcttcccccggcaggaacatgatgacgaattcggggcacggggaaaactgggcaaaataattcttggcgctcagctgctggaggtgtctttttacgtccgcggcgtggcgggacatccactggctgcgctcctccagcctgtccgtctgcccggcattcaggtaggaggacatgggggccttcgcgtcaatgatgatggaacggcctcccggcaggtggatgaccatgtccgggcgcacccggtcctcttccctggaacgggtctcctgcgtcgtgaaatcacagtattccaccattccggccagctccaccacgcggcgcagttggagttccccccactggccgcgcgagctgttgtggtgcagggcctgggaaagcctggcggtctcattcttcagggcttcattcccggaaaggatgtagcggatttgcgttttcaggtccgtataggcgcccacgcgctccttttccatctctcccagccgggactgcacgagtttcagtgactcgctcaccggcttcagcatggactcaatggcctgtttgcgggattccaggtcatggttggcctgctggcgctggctttgcagccgcgtttccgccaggttcaggaattgtttttccgaattccggaggacttccgcgctgatgccggcgaaggaatccttcagcacctcttccgcccggtggagcatctgtgttctatcctccgcccgttcctgccaggagcgggattccgcttcaagccggacggagcggtcccggtagcgcagcagcagaatcagcagcgccacgcaggcggccagcagcagaagggcgagaaaccagggaatcaggggagaagtcataagaagggtaaggcaatcagatgggggtggcgtaggggatggcgtccgtttcttctacgggttcggccaggggaatattgtcgtcgctgccgtccagcggctccgcatagggaatattctcttccgtatccggttccgccatggggatgtgcttttcacacatcctggtgggggcctggtagccggcggaggtttcaaaatacgccgtcttggcatactggcagccggaatgggccagttggttggactcccggcagacgagcacggcctgtccttccgaaccgggccgcgtgcggatggcgttggcggggtagccctccttctgggcggccagcatgatgtccacccagacgggaagggccagcgtgccgccgtagcctttctccagaatcttggtggaggagtcaaaccccacccatacgctgcacgtgagattggaagtatatccggcaaaccacgcgttcgtgtaattgttcgtggtcccggtcttgccgccgcagggggacttgaagcccagcgcagtgatcctgcccgccgtgccgccgggtttgcagacctgctggaggatggaggaggtgatgttggccgcccgctgggaatacacggtgcgcttgctcttggtgatggcgaagcgcggctggccctgggaatccgtaatgtggtcaatgatgtacggagtgggccgcacgccgccgttggcgaagacgctgtaggcgctggcgatgtccagcggggaggcctcccacgtgcccaggtaaagggccggggtgcgggaaatattcccgtggaagcccgccagctgggcggactggatgacgttggacagcccggcccggttgccgatgcgcacggacatggtgttgcgggaaaggatgaggccgaaggaggccggcttcatgccccggtacgtgccgtccgaattgcggggggaccagttggcggctccgcgtacctccccgtaggcgatccggtcgtctgaaatgcgggtgcccgcggaattgccctgctggaaaaacgtggcgtaaatgaacggcttgaacagggagccggtctgccttctggactggatggcgcggttcagcttggattcctccgcatcccgtccgccgacgacggcgaggagggcccccgtggcgttgtccatgactacggcggcggactggatgtaattgggcatgggaggctgcattccctccttccgttccgcgggcagcgccttccaggcggccagggctgcttcatattctgccttggtggtcagcttgttcttaaggattcccttcttctcacgtttggcttgcagggacgccaggtgcttcttgaaatccttgcgcgcttccagcgcttccatatgcttgttgatggcgtccagcgtggcgttctgcaaatccaggtccagcgtggtgtggaccaccagaccgcccaggcggatgtcttcttcttccagaatggcgtccagttcccggcgcacaaggtccatggcgtaattctcctccgaccgggactggggagtccgggtgacgatgggttccgccagggccgcctgatactgcacctccgtgatcttgccctcgtttttcaacagtcccaggacgatgtcgcgcacttttttggcttcctccgggtgtttgatgggggaaaaatcattcgggccgtaaatgatgccggccagcgtggcgcattccgccagggacaggtcgcggggctccttgtcataatacccgcgcgccgccgccgcaatccccaggaaagtgtgtccccagaaaatgcggttgatgtaggtctccagaatctcatccttcgtgtaggtggcttcaatgcgctttgccagagccacctccgtcagcttggaatgcaggttgcgctcccggtggttgtaagtgatcttggcgagctgcatggtcagcgtggaagctccctgcgtggccctcttgtgcttgagcacctgtgcgaaggcgcggcccacgcctatccagtccacgccgccgtggtcgtaaaagcggttgtcctcacgcagaatcagggcgtcgatgaaaatgggggggacttcccggaaggacacccgcttgcggttttccccgtgcagggtgccgatggtccggttcttgcggtccagaatcaccgtgcgttccggaatgttgctcttgacctcggaaatgtcatagcggttggaaatggttccgtaaaggaacaccaggatggaaccgattacgatgccgacgaagcagcaccccagcaggatgcgcaggggccagctgatgaaccagcggatattccgcgtcagggagccgatgaaacggaacggcatcagcaggacaaacagcagggcgccgaaaatcgtgaagcgcggcttgcgcggccttcctgcgcgtgcggaacgggattctccttccgcttcagggtagtcctcatactcctcctgcggagccggacgggcagcgcgccgcgggcgcgggggcggtgtgtcatgccgggaagaaccgctgcgggaatttcttgttctgcgggtggggccgggaatgactgccggaccgggatcttcctgcggcaaaccgggataggacggacggggcgcaggcctttttttgcgttccgtttggggacgggaagccgcctcaccgtcctggatgcgttcccgccaggagccggcatttcgtttccgtgatttgtcgtttaaacccatccgtgagggaattttatcataaacaaccggaatggtctaagcaaaagatggagcgtcatgtcgcaatccttagacaaattcgtaccggtttgaacgtttatatggtaggatatgtcctatcattcgattatcgataatttcatgatatcagcattcaggatggcgagtttttattacttggtcgttggggggcttatgtccctgttgttaggaggaatgagtcttgcggggaatgtctcttccatggcggacttgcagaagcatgtgcatcaggtggcttccagggtcacggccgctacggtagcgctggtttccgacgggggggagacgggcagcggagtgattgtcactccgcaggggctcatcctgacggcggcccacgtggtgggcggcgatgaaatcatgcgcgtggtctttgccgacgggcgcgtggtcaagggccgcgtgctgggggccaactttacgcgggatgccgccatggtgcagatcatggacggcgggaactatccccatgtggaactgggggaatccgacgggctgcatgtgggggactttgtggtggccctgggccattccaagggctttgacccggaacgccgcgcgcccatccgcatgggaaggctgtgcacggacggaaaacagcgttttctcatctcggaatgcacgctcatcggcggagattccggcggtcctctctttgacctgtccggcaaactggtgggcattcattcctccatcggccccatgttgaaaatcaacaaccatgtccccgtctccgtattccggagggactgggacaagcttctttccgggcggcactggggccagcttggacttcatcccatggctgacccggaatcccccgtattgggatttgccatgatggacgtgctgggcgtggacggagtggtagtggaagacgtggtggtcaactccccggcggataccgcgggcatcaagccgggggacgtcatcacccacatggacagccgcagcctccgttccgtgcgagacatgctccgtgagctgggcaggcaccgtcccggggaaaccgttccggtggtagtggtgaggaaaggtacggcctacaaggcggatcttacattcggcaggcgcggcgatctgatgtccggcctgaaataccaggaacaaactcaaggatgatcatgaaatacttatgggcggcattcgcggcggcttccgcgtgtgcccaggaaatagcgtccccgctccctccggaccagatgatagccccggaggacaaaatcgtgctggatagccaggccaaggaaatcttccgggaatgggacaaggtggctgtacctgtgggtcagtccgtggtggcgctggtggccggcaatacccaggtggccctgggaacggtagtggggaaggggaaagtgcttaccaagttgagcgacctccagaaggaacggcgcccggtcatgctggtggactcttccggacgggtgtatgacgccaaggtgctctttgccctgccggaacacgatctgctgatgatggacgtcccggggcttcccgctccccccattgacctgaactcctacgtgcaggcgcaggaaggggatgtgattgcggccgtgtcccccacggggcatgtcagtgacttcggggttgtttccgtggcgcagcgcagcctgcgggcggacgaccagccttacctgggcatcgtttccgatccccgctgggacggggagggagtcatgatcggcggcgtggaggccggaagcggagcgcaccgcagcggtttgctggccggcgatgtgctgatgaagctgaatgggaagccggtggacggcatgtactccatccgtgccgccatggtcggggtgcgccccggtgagacggttcccgtggaagtgaagcgccgggaccaggtggttgaagggaagctcctcacgggccccaggcccaaagtgatgaaattcccccagaagcgcctggacatgatgaactccatgggcaaccggatgagcctgaagcgggacgaattcccgctggtcatccagtcggacatgacgctgttcccggaacgcgccggatgcccggtcattgacgttaacggaaaatttgtggggctggccctgagccgcgccggacgtacggaaacctacattctcccctcctggatatgccgggaactggtggaaggggtgcttccgcaggtgcagcagtaccaggccggccgcggagaaaacattccggatgcccagcctgtggacgactcctatgatgcacggcgcttggaggaaaaccgccgcaaggtggaggacaagatgagccgccagggactggtgccgaaggtctattaagctcggttggtttccgggaggtgaagagatgaaccgcccgggagcctggagtattcgaggcatcttcgtgctcttcatgccgtccggttttggccgggaggaactttctgccttacctgctgtttttacttccttctcttgtgggaatcgtgccgttgttgtcccggaggaatgggctgccgcatgaggaaactaaatggcggcggcaatttctcctgccgggaaaacgcggagcagtttattcaccgggaatggcggcaggatgggatgatggcgtaaaaaaacgggcagtaatgcccgtttttccgaataaaccggattggtttccggctcttgaatatctttcgcccccgtattgccggaggctgagggggaaaacttacttgcccgaagaggctgccaccggtttttccttgaaaatcatcagctccgttagaacgacggtgcgtccggtggaatccggggaaatgatcatcactactttccgcccggggtaggtggtcagcatcatgcccctgtccttcaccttcacgactttgccgttcttcaaacgggtcatgtacgtcaaattggcggcagtggtgcgggaaacgttgctgtccgtagagtccttgccgaaaatgtaaatggacttgctgggcaattcaatggcgctcttttctcccgcggggggcttgggaagctccagagtgaaggtgcgcccggtcagattctgaatgtaaacgcaattaagcggaagttccgcttcattgataaaatccagggtaaactctccgctgctgttcttgcctaccagcgccagagttttggggccaaggtcggtcggaaggggcttgctgacgagcttgttggtcggcatccccttctggtccaggccaccgaacagggtaataatcttgctcctgggataaacgctgcggcgtccgggaagggcggcgcggatttccactttctccagccttttggaatcaatgggcatgtaaatgggagaggggaggggcatgggcgtcttaaggacaaaccggatgccgttgacggcggcgggggagagggacttgtccacggtatcggccgccggggcgttcgtttccggtttagccggctccggcttggaaggagtgcgggtctgtccatggacgaaagaaacgcttccgagaaggcaggtaaaggcgagaatgggtaaaatgcgcatatattcgggggagtgaaaaataaaagggggcttttggccggcgcatggacccttgacggacagtcttgcgggagagaatgcagcaggctgaatccatcggggcgtgcaacagggtacggacgcaagccttgatggactttatatcccttgtgaagtacaggaatgaggaaggccgtgcaagctcaaagtagggatgttgaagataaaaaatagaaaattccagcggtaattggccccctttttctgccgggaaagcctgcggattcagcatttctgttacgcatgacctcatctgcacacggtaaaatagtatctgaatgaacaaaatggcttatgtgcagatacatggagtaatgatgaaaaacaagttatgtgacatctccacagaaaaataattgcatttaaaggataggaagccttggttattcgccttggccgggtaagatgcgttttgtgggaagggccctcttggcggaaaaagtgagataaagacatctgcggaggaaaagcatttgactggggcggaacttcggcatcctatgcaatgttccgtgatatttatccgcaggaattttacgataaaatcatcaatcgcaaactatgtgtaagtggccggaatatgcttgatataggcacggaaacaggaacatatgaaactgcttgctgaaattgctcctgctgaatttgacatattgcatgaagtggctgttgctgagcttaaaaaataagtggtggataacgtttatagaagcggtttaatgacgtccctatggaatgtgggctgtaccttgtctttggctcttttaaataacggcaaggagagtaaaataatatccgctttacaacttttcactttttcgccttcgggaaaagcttgaaaattcgttcgttgaggtcttccccatcgagcaaaaatgcagaagtctctgcactggtctgtctgtcgcgatggatttcgtgaaaaagccgttcccgcttcacataaaaactgctctggaatgcagtggaataattctcatgccgggggtggttacatggaatgatagaaaccctctttcggaggttcgggataaaagatgcaggcctccgcggcttgaaatccgcaaaggcccattttgccaggatttcagaaggcctgttttctttaattggctgccttgtaagttccgcgaacaaaagccgttccttctctttctggatagtaaacatgtcagcaagccggcctcgtacttgcagatttatatttttcgtaattctcaaatggaggctcacttaaaaaatatgcgtctataattgcaaccccccccattatccctattacccctattacccctttaaaccttataacccctatctttctttccctccctccccttaagcgcaaaaagagccgctccccgtggatgggaagcggcgctggccgggaagaagaaaaaaactctctctctcttttattacacctcctcgggagacagccagcggaaggagacgatgttgaacttcctcccgaacgccttgttcaccgcgctcagctccgtctcctccagcgctccgctcttcatgttgatcttcttgaccggcgtctccgggctgtccaccgggtccacgtaattgatccccctctgcaccaccgcctcgcaccacgcccgcgacagcaccacaccctcgcggttggtcagctccccgtaggcccggatcgtaaacgtgtcgtcgcgcgtcgttaaaatattgcccagcaccgccagcacgtcggactggatcaggtagccgggcgccgccgtgtacaccgatcccttggccgcgtcctggttcgggtaccctcccttgggcgtgatgaccatgtcggagagttcgtcaaaggtgctgttgatggagctttcgtcgatggccgcctgaagcgcccccttcacccccatctccccgctctgcaggcggcggttgacgaagtcggacatgttcaggaaggggcccctcttcttgacctcctggaccatgttccgggccagggacttgatctgcgagtcgctgagcgttctgaggtcggaccacgccatggcctccccgtccgggatgccctgggttacgcccaccgagccgtagtcgtccacgtgggacttgtcgctgctggccaccccgaagcgggagaaggccgtctggctgttgttgagcacggagggggttccgctccgggagtagaggagcttgcgctttttgagcccaagcagggtggcttcccaggcgcgctgggaggtggagttgacgttgaagcccccggccacggtgaggtacttggaggcgtgcttgtagccttcgtcggtcttggagagttcttcgacgacggcctcggagggcttgccctggaggtcgggcacgaagcgcctgttggcaatgccggcggccttgttggaggaggcgtccgtggagaaggcctgttgaagcacggttttaagttcctccctgcccgtgcctccgatgctggaggggcgcgcggccagggaggaggcgaaccaggagtcccagagggcgtcgttgaccatcaggccgtggtcccagaagtcgcccagggaggcgtctcccatgatttcattgtgggagaagaccttgtcgggcgggagcatggggtcggcaaaagcgttgccgatccccacgcccggcacgccggactggtaggcgaagcgcttggcgatggccgccttggagtcgctcctgtaccatcccggggtgaggcggcagcctgcgaagccggcgaggctggagggctgctggaaggggagttccgcggccacgatcttgttgacctgctcggcgcccggtccgccgaagggggagagcctggtgccgtcgttggagaggatgttggagatggtgatggggaagaagtcgctgttggcgtttttgacttcaaactggtaggggctgtagaggcgtccgagctcggaggcggtgggcatctgcccaccccagaagagagggctggagtgctgccatgtcttggcgcggtagtccttgccttccgggtaggctccgatcaccggaggcttgccccattttaccgataccccgtagtaggcgatgaacgtggaatccaaagagggagttccgtattggcccgacttcttggcctcttcatcggttccttcattatgttcccacatttccgccggaagcttaatctggtcgaccagaggtttttcccacgcgccccagttcaggttgaggatagccggcatcgttttggcgaagatgtcaatttcagccgtgtttttcccattcagggaggaggagctgttcatcttgttgggattcatgagaccggcccccatgacgaaggttcccaaggcctttgatgctcccttgtccccgtatttgacggcgagaacatgattatcgggcgtaccattgagttggctggtatcttccgcgaagataatggaagccttggcgatgccctgctgattatatccactgccgtccagcagttcgtagcgaacaccgtccgtcaggttgacggcataggagctgacctggccaggctcctgggaccaaccttccttaagtgggaacctgtccggtttgaaatcaccgctgttgggttttgtcttataaacctcattgccattggcaatgttggaaacgaccggctgggcaaagacaacgatttctccagccttcaaggtagaaggttctcccttgatcgtggccccatctccactgagtttggatgtggtgcggaaagaggcgccaaagtcggctacctggcggttgttataagaagcgtttaagtaggggaccaggcaggattccccgtaattggacaattggccttcatccagctggttccatgcgaatttgatattgtgggaaagcagcaggggcatgaaacgatgttcaccgaagtaagcgccccagacgccgccgtcggctccggtcagtttcatatccacattgtaggggttccaccagacgtacaccggaatgacggcgatacggaagtcaatccatccaccgcggttgggatgcttgttgccgtgtttgacatagttaagtcccacgaaagaataaaagcgcagcaggatgggatggcgcatgtacgtgtagcggttgtccatcatttccatactggccgcagagtccgccgcaatcaatgtgctgggggggcgcccattccattgcagggtggcggaagaatcttgtccgtccctcttcgtggaggagtcccacacgttggcccacaggtagagctggttccaggaaccgatcgggcggttctgttccgatgggtttccgtcctcggacgtatacggccggagaccgatatccgaggtgtctccgcggaagtcctcaggcagcttttcctgggaaaacataatgttgaggtcctttttaagacctccgaatttagaatccgtcagcaggctggaagaaaccagggagatgtcatgatagacttctccgaggtctttcaagcgtccgtttttattgttagccagcagagaatcaagggagatgagttttctgactgtggacatgtcgtttccggaactcgatgccatcatggaagaaaggttgaggggctccaaatcaggaccgggcgtgtcccacgtggagcgcatcaccgtcagggcatccgtgctttcttccgaggcatgcggcatcaggttgatgcgcgccttctggttttctcccgttacccaccacgcaatgtatttgcgtgagttggcgttttttttcagccccatggtcttagaggaatcgtccacgcgcaccatgcgggcgtagatttcctttttgtcctggttcttggcgcctacgggcgttcccaccgtgccatggtccaccaaggcgacactgcggaaattctggttggtaagggaacgtttgcccagcaggcttttgcccgcttccagcgtgctgagcctgcgcaggtccgggtcggaaatgagccagcggcggaacatggactttcttcccgtatcgtaggtggaagaaatgttcatgccctgggagttagtcttgttgagccaggtatcccagctgttccagacgcccaggatgtacggggcgttgccttcgctggtgccggaggaaaggatgcccgagttggcggaaacgcgctggtcgggccccagttcacactggagctgcccgagggccacttccagggaaaacctggcgagggatttggcctccgcggcaaagagctgtttttcggaaatgcggacctgtgaggatgcgatggtaagaaggccaacgctgagaagggccaggagcatcatcagggtgatggtggcaatcagggcaaaacctttgctgacatgcctgataggacgtttagtgaaatgtttaatcttcatgaaaatggtgggttccggcgtgcacttttccgctcaagtttgaggatataaaaatccccactgtcacgaaggtgcgaagagccaattcttaactctagtcaatacaaaaaagaggcagtccatgcaagctcaaaattgcttcaaacaagcgcattgcaggcagaataaattgacggagaaaccatctggaaggaggaaggaagcggggagaatgcatttttatgataatcagttcttaaaatcttatattatggtatttataagaaaaatcggattctaaattcggtggattgaaaaaagacctgaatatcatattctctcaagaaaagctgcctgaggaattccgtagcgacaccgcagacattggattgcgtccgtatacctccgaggacggcagcccgaccgagcagaaccgcccgatcggttcctggaaccagctcttcctgtgggccaacgtgtgggactcctccacgaagagggaaggccaggacgcttccgccacattgcagtggaacgggacctcccccagcacattgattgcgtctgacgccacagcgaacatggaaatgatggacaaccgctacacgtacatgcgccatcccatcctgctgcgcttctactccttcgtcggcgtccagtacgccagattcggaggaacaaacggccagaatccctccgtaaatggcggattcatcaatctggccttctccgtcattcccgtctatgtgtggtggaacccatacaacgtagacatgaaattccagggggccaatggagaagtatggggggcctacttcggcgaacaccgcttcatgcccctgatgttctcccacaacatcaaaaacggcggcggtgtgggagccatgggcaactatacggaacatccactgactccctatgttcaaaatgccgtaaacagaaacgaccgccaggtggcggacttcggcgcgtccttccgtgacaaggtcacctatcagtcggacggctcaaccaacaagggtaatccttctaccctgaaagccggagaaatcgtcattttcgcccagccgattcccctgattgacgacgtgtccaatcccttcaacaacaactccgtctaccggtccaaaagtaataaaattgacattaaaacggataactttgccatgaaggaaggctggtccctggattccgcccagaccacaggctactccgtcaacatgtactccggcctgaaataccagaattttgacggcaacaagtacctgagcggagacccgttcatggcctccgccattttcgcccagaatgatgacgacctgaaaggctggtccggcacgaccgccgaccggacaccctccgaccacatcctcagccataaatatacggacgaattcggagccggttccaaaaagctgggaaccttcacgatgggggccggtctcatgagaacggagcagatggggcaggccaccacgctgaacggcgctaatacggcagaccccgccatcttctccaagacgatgcccgccgtgctgaacctgaactggggcgcgtgggaaaagcccctgcttgaaaacatcaaattcccggcggacatgtggaaaaacaataccggaccggaagagaacaaggaaaggcagggctattatggcgaggcggatccggacgctcttttcatcgcctactacggggtatcggtaaaatggggcaagcctccggtgatcggagcctacccggaaggcaaggactaccgcgccaagacatggcagcactccagccctctcttctggggtgggcagatgcccaccgcctccgagctcggacgcctctacagcccctaccagtttgaagtcaaaaacgccaacagcgacttcttccccatcaccatctccaacatcctctccaacgacggcaccaggctctcccccttcggcggaccgggcgccgagcaggtcaacaagatcgtggccgcggaactccccttccagcagccctccagcctcgccggcttcgcaggctgccgcctcaccccgggatggtacaggagcgactccaaggcggccatcgccaagcgcttcgcctaccagtccggcgtgccgggcgtggggatcggcaacgcttttgccgaccccatgctcccgcccgacaaggtcttctcccacaatgaaatcatgggagacgcctccctgggcgacttctgggaccacggcctgatggtcaacgacgccctctgggactcctggttcgcctcctccctggccgcgcgcccctccagcatcggaggcacgggcagggaggaacttaaaaccgtgcttcaacaggccttctccacggacgcctcctccaacaaggccgccggcattgccaacaggcgcttcgtgcccgacctccagggcaagccctccgaggccgtcgtcgaagaactctccaagaccgacgaaggctacaagcacgcctccaagtacctcaccgtggccgggggcttcaacgtcaactccacctcccagcgcgcctgggaagccaccctgcttgggctcaaaaagcgcaagctcctctactcccggagcggaaccccctccgtgctcaacaacagccagacggccttctcccgcttcggggtggccagcagcgacaagtcccacgtggacgactacggctcggtgggcgtaacccagggcatcccggacggggaggccatggcgtggtccgacctcagaacgctcagcgactcgcagatcaagtccctggcccggaacatggtccaggaggtcaagaagaggggccccttcctgaacatgtccgacttcgtcaaccgccgcctgcagagcggggagatgggggtgaagggggcgcttcaggcggccatcgacgaaagctccatcaacagcacctttgacgaactctccgacatggtcatcacgcccaagggagggtacccgaaccaggacgcggccaagggatcggtgtacacggcggcgcccggctacctgatccagtccgacgtgctggcggtgctgggcaatattttaacgacgcgcgacgacacgtttacgatccgggcctacggggagctgaccaaccgcgagggtgtggtgctgtcgcgggcgtggtgcgaggcggtggtgcagagggggatcaattacgtggacccggtggacagcccggagacgccggtcaagaagatcaacatgaagagcggagcgctggaggagacggagctgagcgcggtgaacaaggcgttcgggaggaagttcaacatcgtctccttccgctggctgtctcccgaggaggtgtaataaaagagagagagagtttttcttcttcccggccagcgccgcttcccatccacggggagcggctctttttgtgcttaaggggagggagggaagagattgtttttacggcggggttctgccggtagacaagatggactatttggacaatagggacgggatggaagacgggaagtgggggtgttgcacaactgtaattctgccaatgcgttgctgattgtgacgatttcttaaccaggtttctcttcctctccttgggagaggataggtgccgttggatagaaggagggggcattcctggaaagataaaagcggtagtttattctacagccggtttcatatgttggggacttgcaaagaataccttcatttttacttttctgttccggtaacgggaagagcactgctggagaatgcattttttatgggcaaaggagtggtggtcaacatgcctttcagaagaatgaggcgtcgaatggataacgggatgtcctgaaactgcaataaggtttcaagtttccttaataggggaaagccggaacgcaagccgggtaacggcggatgccgttcagcgtgcggagatgtggcggctcctgaaaccgaagccgacggcaaaggtgaccagggtgccgatggttacgcgccatggaaaggctatttccggaatatattgcctccagtcggcgggcagggggatgagttcggtcagcaaggcaatgaccaggaagcctgccgccatggcaatgatgtttcctgaatcgtttcctctggtgcgcgtcagcatcccgagcaggaagatgccaagcagagagccgtaggtgtagccgaagatgcccagggcgatttgaatgatgcggacttccgggtggtgcaccacgtaccacgccgtgatggaaccgacgaggatgagcagcagggagaagccggccgttccccagcgcacgcaccggaggagctgacgttccgtggcttccggtttgaatactccctggtaccagtccttggtggcggtggttgccagggagttgagagcggtggacagggaacccatggcggttgccaggagcccggcgatcagcagcccccggatgccgttgggcagttcatggatgatgaagtaagggaagacatggagctgcggcgtgtctgcggggagggacgccggattgtactggtagaagacgtagagaagaatgcccgtgaagaggaagacgatgacgatggggaagtccagcagcccggatacgatgactgcccgcgttcccgccttgctgctttttgcggccagcatccgctgcaccatgtcctggtccgtgccgtgtgtagccatggtgatgaaggtcgctcccagaaaggctgcccataccgtgtattcctgacccaggacatgggcgcattgctggaggaagtccaggccttccttggtgccccacgagaagaatttccagtcgtcccctccgttcatggcggctgagatggagttccaccctccgggaatgtgggagaagagaacccacagggcggagagcatggagacgcccagcacgacggcctggaggacatccgtccagacgacggctttcaagccgccgatggctgtgtaaatagtggtggcgatggagatgacgaccagcgcggcaatgtaaagcaggacaatttggttggcgtccgccgtggtgtccgtcatgaattggtaggcaatgaccagcagaatgcctgcaaagtaaagtcttgttccactggcgagcacccggctgaccaggaagaccatggaggccgtgcggcgcgtcaggagcccgaatcttttttccaggtattcatagatggagaccaccttgtagtcatagtagggtttgaggaagagcttgccgacgatgatgcggcccaggatagtgccgatgcagagctgggcgtacgtgaagttgcgggtatggtagccttcccccggagcccccagaaaggtggccgcgctgatttccgccgccaggatggaggccagaatggcccaccagggcagggagcggttgcccagggcatagtccgtcagggagttctgcctgcgtcccgcatagatgccaatgcagaagatagccagaaagtagacgacgatgacaaggaggtccgtgaacatgcctggaaagagaaggccttttccggaatagggtttccggaaaaggccgcgggctgggtgaagggtcaggagcggcttttgtgttccagcgcggctgaaaccagaccggagaagagcggatgagcccggttgggtgcggactggaattccggatggtactggcaggcgatgaagaagggatgggagggaagttccacgacttccaccaggccgtgttcatcattaacggcgctgatgaccatgcctgcgttttccagttcttcacggtaggccgggttgaattcgtaacggtggcggtggcgttccgtgacgctgtccttgccgtacagcttgtgcgccagcgttccgggctggatcagggctttataggagcccaggcgcatggtggcccccatggctttgattcctttctgctcttcctgaaggctgatgacggggtgggtggatttctggtcgaattccgtggagttggcatcgtccatgccgcagatgtggcgtgcgtattcaatgacggctacctgcatgcccaggcagatgcccaggaacgggatgcccttggtgcgcgcatattccactgtttgtatttttccttcaatgccgcggtctccaaagccgcccggcaccagaatgccgtccacggaaccgatcagggcatccgctcctttttcttcaatttcttccgcgtctatccggaggatttccacgcgagtgtcattttcagcaccggcatgagtgaaggattcatagatggatttgtaagcgtcctgaagggcgatgtatttgccgactacggcaatccttacggagtggcttgggctgatgacgcgccccacgtaacgctgccagtccgctaggttgggagcgggaacgtccagccccaggcgcttggtgacgatgcggtctattttgtcctggctgaggtccagaggacattcgtaaatggtgtttttaacgtcgcggaaggcgatgacatttttggcttccacgttgcagaacatggcgattttcctcctttcgtcttcgctcatatcgtattccgtccggcagatgatcacgtccggctgaataccgatttcccggagcttggcgacggattgctgggtgggcttcgttttcatttccccggcggccttgatgtaggggagcagggtgacgtggatgaagcagacattgtcgcggcccacttccagcgcgaactggcgcaaggcttctaggaagatgtggccttccatgtcccctaccgtgccgccgatttctgtgatgatgatgtccacgtccgattgttccgtgacttcataaaggcggtttttgatttcatccgtgacgtgcggaatgtattgaaccgttttacccagatagtctccccggcgttccttatgcagcacgctttcaaagacctggccggaagtaaggttgttaagacgggagaggttgcaatggacgaagcgttcataatggcccaggtccagatccgtttccgccccgtcgttcaagacgtacacttccccgtgctggaacgggctcatcgtgccggggtctacattcaagtaggggtcgaatttttgaagggtgaccttgagaccgcagcgttccagcagagtaccgatggatgccgccgccagtcctttgccgagagaggagacaacaccacctgtgacgaagatgtatttcatgattatggttcctaatgtatgtttaataagatttgttccacctgggccgcctgttccggcgtgtctacgcccacgctgacatggtccgttagaatgactctgattctggcgccgttttccagtgcgcgcagttgttccagggattccgtttgttccaggggggagggttcccagcgcacgtagttttcaaggaagtcccggcggtaggcgtaaatgcccagatggcgcagcgggggggtgacgcggggatggcgggcgtagggaatgacggaacgggagaagtacagggcgtcgccgttgccggccaggaccactttgacgatgttcgggttgtccaggtcttcctgcgcgctgatggggcaggccacggtagccatggacagggccccgtcagaaaccagcgcgtccgccagcctgtcaatcagggccgggtcaatgaggggttcgtctccctggatattgaccacatgagtggcggaggggaaggcttgcaccgcttccgccaggcggtcgctgccgctgggatggtccggagaggtcatgatcgccttggcgccaaaggccacggcggtgtcgaagatgcgctggtcgtccgtagcgatggcgatgtcgtcaaggcgggagcagcgggaaacgcgttcccatacgtgctggacaagcggttttcctgcaatgaggtgaagcggcttgcccggaaatctggaggacccccagcgtgacgggatgaggccgatgatatgatgaggagagtctgctgccatgagaagaggaaacgcatcgaaaggtagcaactccccttgaattagtccagcctcaagcatcagatgcgcccgtttttccggagtaggggcggaacggtcaggcggaaatggcgggcgcggcggcaggctgcggttttgcctccgtcttccggataatgagcggcatgtattccttgcggatgtggagggatatgtacaggccttcctttttggcgcaggagaagagcaccttgatgatggccagggagatgatgtccatggagatggtggtactatccccgaagatcagcagaaaggtgagcggcttgatgaagtagacggttgaaacgtaaagaatgcccagcttgtatttgtggttgcggtagattctgctgacgatccatgcataggtcatgccgatgacggacaggatgaggtacagggaaagccccacgtagccaagcgtttgaatggtggaaatggggccgctgtgccatagtccgttccaggcaaaggatgactggtcctggctgaggttgtaggcttcctcatagatgttggctttcacgatgctgatatcccgtgaaaagccgtctccgaataccttgtcctgaatgaagtgttcgcggtcgtccagagcccattcccacatttcaaagcgccagttcatggacgcttccgcgtttactctggcttgcatgctgacatccaggaaaggaagggctgaaagtgtgcgctggataccgtaaggaaaggaatggagcattcctgcggaggagaggagcagaagcaaaagcattccgaagatgggaaccaggatgcagaagaaccatcttttgtagatcagagatattgtgaaaaacaggagcagaagctgcgcaataaaggagcggaatccgctaaacaggactccgatggttccaaggacaagaagggcgccccaccagggacgtttgatcatctgccatacggagtagttgatgatgagtagttgaaccgccaatagggaaatttggaggaaggtcgattgccgcgagtcttcggaggcggcgcttgccgagactgcggccgccgccgggttcgctccggcagaattcggtgaaaggatgccctgggcggttgagaccagcgtgaagataacagtcagaaaaacggcccattgaagcacctttcccagttcattgctggtggttttcagggaggagaggcaaagataggcaaggagcgcctgaaggaagaggacgtatcccttgcccccgtagtagtcttccagcacattcaggcccaggccgaaggggtggctcaggaagacgtagcccacatgcatgaacagcacgagaatgacagcgtccaggagaggggcggcattccatgtcagggttgaacgcttgagcatggcattccacaagtagaagggaatggtaatgccgtaggcgaagaggggtgcgtagtcctttagttccggtatgggcaggaagagcaggggaagccatatccacaggtaccataccttttccttcatcaggaaaaggacggccaggaggaagggggaaacagccagggcgatggaaaaggggtctccatccgccgacatgacgccgcctatgatggctagaagaatggcaactactgaaatcagtacaattttaaataaattaccattcatagggctgcccgtgattcccgcataaaagacaatggcgggaaagagagatggatggtggagtataggggattcgaacccctgaccttctcattgcgaacgagacgctctaccaactgagctaataccccgtggaaaataccggggggaatctattccatccgccgcctgaaagcaagaggaattcgtcaggcaacgcaaataagatggaagatttcgtgttccttttccgcatgccgccgtttcctgtccggcggaagtctgccgcagggggggagattcatttttccggaaagggccgggaggcggcgcaatacgggaaccgggaaaaggaatgcctgtattcccgtagacagcggacggaagttcaaagagcggtgaatttgatgttccggactctggcaaaggcacgtttcaagcgggaggaaagccattttccgcatggttgttcaatgccgtaatgcatggcggctcccacggcaatcaacaggagcgcggcgcatatccagaagaggatgggacgggttccgtaccggtcctgcggccagatgtactgcatgaattgcaggaggggaacatgcagcaggaagacggcataggtcaggaggctggcccggttggtcaaatggatgagcaccgctggaattttaacagccggcggctgaggggattttgcaagtgagcacgcgctggcgatggtcagcacggcaatcagcgtgtcgggaaggaggaaggccagggaggcaactttcccgccggagccccacaaggcgccgatgaaggtctggtagagaaggtagagcaccccgaaggagaacacagccgggctccatcggaagaagcgttcgtgttttttatagagccgtgccgcgcagcagccggcgagaaattgccataaacggtagggcgggaagaagtaaaggcgtgcgacgggttccaggaacgtgcaggcgacagcggttacaaggcccagcgccagcagcaggggaaggcgtttccttccataggccacgagagggaagataaggacgaagaggatttccagcttcatgtaccataaggcataattgtctcccgtgtgcaggttcatgaattgattgccgccgaaggaaaccagcaggacgccgagcaggttgtccagctggaattgctccttgtaggagaccaggctggacaggaggatggccgtgaacaggagcggccacagccgcgcaaatttgaagatgtagaaggagggcggactgaacgaattttctttcagggtgaacgtcatcaggaatccggagaggacgatgaaccagtccacgcccacggagcccgcaacgggcgaccagcgcgcccagtggaaggcgcagatcatcaggcagaggatgatgcggattaatgagatgcctgtaatgaaggaggaaggggcgctcattggaactggggcatcagcggtcccgcctgtttttaatgcggctcctgaggtgggcttcttcaaaaagaccctccatgtacagccccacggcctgcgcttttctgaggctttgggctgcattcctcagggccggaagcgcttcttcgtaggaagggatacttccttttttgaggggggaggcttccacaaggtgccatccccaccggcttttaagaagcaccggcttgttgtcgggaacgtttgccagctccaggcccagggtttcccgtgcgcgtgcggggctgacccagccaagttccccgcctgcgggcgcggagcgctcgtcctcactgaattccctggcaagccgggagaaggtttccccgccttgcaggcgcgccagcagcgtttccgccgcctgtttgacctgggtttcatccttgtgaagggtagccaggaagatgtgcctggttttccggaggtcaggggttttaagctggtcccggatcaaatcataataggttttcaggtcttcgtcggacggctctgccgcctgggcggtcgcccggtagagctgttccgtctgcttgagccgcgccgctattttttcctggaattgctgctgcgtgaatttctggtcatgcagggttttcaggtattgttccgtgttcccgtcaaagcgggaacggatttgttccgcggcgcgcgcagattccgcattgcggttgggaagctgaaggtcgttgacgctggttttcaggcgcaggagggaggagccgatcaaatcgtacctggcccgcggagccaggtctccggctacgtccagttcatgggtgagcctgatgcctccgtccatgtccagcacgggaggctggcgcaggagccggagttccgcaaccctccgggagagctggttggcggtgacgggttcgccgtaaacttccgcaatccgggcggagttgtctccgggcggtcccggcatcggtttcaggtaggcgtccatcctgccggccaggaagccgtgccagagaaacaaatcccccaccagatagagcaggaatgctccatagatcacgagcttgaacgtgaattttccagtgggggacatgggagggacagggaaggagcaaagggcctagtttccaccgccggagtctgccagacggacggattccgggggaaggaagttgcggaacctcttcttttcaatgcacttcatgtaggcttcctccggagagacgacgccctgctggagtttttgccagatggcgtcatccatgaattgcatgcccatggcctttccgccgacgatgacgtcagggattttctgcgtggcgccttcacggatgatggccgccacggcgggcgtggcaaagaggatttcattgacggctacgcgtcccggcttgtcgctgcgcttcatcaggagctgcgccacgacgccgcggagggagcccgcaagcatggtgcgcacctgggactgctggtcggacgggaatacgtcaatgatacggtcaatggttttgctggcgttgttcgtgtgcagggtgccgaataccagaaggccggtttcagccgccgtgagcgccagggagatggtttccaggtcgcgcatttcacccaccagcacgatgtcggagtcttcacggagggaagcccgcaggccgtctgcgaaggagggtgtctggaggggcacttccctctgggtgacgatggattttttattggggtgaacgaattcgataggttcctccaccgtgatgatgtgccgcgcctggttgctgttgatgtagtcaatgatggcggccagggtggtggatttaccggagcccgtgggccccgtgaccagcaccagccctgatctcatgtgggcgaattccttgacgaccgtgggcacgcccagttcttccagcgtggcgatttttgtgggaatgagacggaagacggctcccaggccgtgctgctgcctgaagtagttgcagcggaaacgggaggtttcatccatttcataggcgaagtccagatccccttcttccaggtatttctggaaggcctgggagtcgcatatttccgcgagaaggtttttgaacgactggccttccaggttttcgtcggagatggcggagatggtcccgttgacgcggattttcggaggctggccttcgctgaggtgaaggtcggagccgcccgcttctacgaggtatttgaagtattggtcgataacagccataacaggagtgtgtcaaagttaaaggttacttgattcccaggaaggatttcatgatggttttgtcttccgcgcggaagatgcagtcttccgtggtgatgagacccgcctggtgcagcgcccggagggagtcgtccatcaggatcatgccctgggccttcccggtctggatgcagccgggaatcatgaatgtctttccttcgcggatgcagttggcgatggcgggtgtattgaccagcatttcaatggccagggcgcggccgttgccgtccgccctgggaacgagctgctgggagatgatgccgcgcagggattcactgaccatgatgcggatctggtcgcgctgctccaccgggaagacgtccagcacgcggtccaccgtgcgggctgcggaccccgtgtgcagggtgccgagcaccaggtggccggtttcagccgccgtgagcgccagggagatggtttccaggtcgcgcatttcacctaccatgatgacgtccgggtcttcacggagggccccgcggagggcgcgcgcgaaggattccgtgtgcttgtgcacttcacgctggttgacgtggcagtttttggagggaatcaggtattcgatggggtcttcaagcgtgatgatgtggtcgtggcggtcctggttgatgaagtccacgatggaggccagggtggtggatttaccggaacccacggagcccgtcaccagaatgaggccgttggtgtagcgggtgaggggcaccacgtattccgtcggcaggccgatttcctccatggtgcgcacccgcgtgttgatgatgcggaagcagatgtcatagcccaggcgctgcttgaccacggaagcgcggtagcgtccgaagtcgttggcataggcaaagtccacgtccccctttaattgaaggcggttccattccgggtcttccagaaagcccctcgccagaacttccgtgtcctggggcgtgagattgggcgcttcctcccagatggggagaagctggccgaaccggcgccaggtggggcggctgttgacggcaaggtggatatcggaacagtcaaagtcctgtccaagcttaagatatccgtcgacgtggggcaaaatgtattcgctcatgttgtgaatgcagcaaactgataaagctacatactaacgaaaacggggcttttttgaccagcaaaaaatgtttgggaaatgatttctgtgcaggtggccctgtgccgtcccgtggcgggggaggatttttggagagaagccttgaggaaggctcgcaaaagtttatttccgggagcgggaaagagcatttatgtttttctgccgtttcgggaaccggaccctgaggaatcgcggtttttcacggactttcccggcagaggcatacgtttggcatggcggaaagagccgacagcaatcccgctgctgttttcatggttaaatgtgaaatggcggcattgaggacaagtctatggcgcggttgcatttttgcctccgggggaaaggtcgggatattgttttaaatgactttcttcatcaatttttcctgttcctccgaacggggacacggacggaacatttccaaattccccgccgccacgatgactgggaaggccatgtttcctccatgatggtcgtcttcctatattggggcctccctttcatggccaggtagcttttttcctgattgcgccctgttatttttggcaggaattgttcatggcggaaagcgctggaaaggggaattgagctgccgatgcctttttggggtcaggcatgccctggtctcctgtttcattccaatatcgccgcatggaccatgccgaaatgcctgtccagcctggcgaggtacgtatgaacaaaggggcgttgttttctttggcggcaggccgttattttatgaggtatcgcggccgtctgcatgaagagttgtcctgcagggggggacgatattcccggaacggcgcgcatctgacgccgcagggatatgaagacatttctcccgcaacagcggaattcctgagttcttttttaaagcagcggcttgaaaaggcagcgccgcgtcggccggaaaatcctgttacttgaacaggttgaagaatttcttgcctgccaggtcgaagcccatttttttcagggacgggaaggcgagggttaccaggatttcaatgatgaaacggaagataggggaattgatccagcttccggaaacatgcggacgcgggggcgccggatggctttttttccccgtaaacatgcggatgagcagaatgcctcccaccgtgccgacaatggagccgatcacaggcagggacatggccttttttttcagcttccggaagtggtcggcctgctgctgcgtcttctggaccagggtatccgtctcattgacgatatccagccgggaggaagccacccgcatcaggagtgcgagcttttcttgagagccatttgcagacatgataaatccgttttaagttcttccgccgtcgccggggcgatgggcgttacatgggttcggctgaaaaggatgagcgccacggcagccgccaccagatgaatgccggtggttacggcaagtccggcaatgattccccagaagtgggccatgaccatggtcaggaagcaccacaggaacagatagccgaagatggccataaaggcggccagcaggagcagggccattttcctgcccagccttttggacgcttcctccagttccagcttgagcagcgcggccaaggcttccacatggtcaagcgccgccgctccggtttcccggagggaccggaccatggccgctccttcttccttttcctccacaatgggggcgacgaaggtgcgtttgagtttgtcaatcagtcccatggctcggtttgaaggggtgagggcgccatgcgcttgacgcgcatggcgcggaatgagggttaacggcggcggatgagcatgccgatcagaaggcccacgcccatggcgatcagcacggactgggtgggtttttccttcacgtattcttcgcccgcttcatggaacttcttggccttgtcacggatgacttctcctttttcctgggcgtagtcacggatggtgctggcctgttccgtagccgccttgcggatttggtttactttggccgcggcgaaggccctggcctgttgaaatctggttacggcaagctcgcgggcggaagggcaggagcaggcggcgtcgtttgctgctgcggtcggttcaagttcggtttggttgtcttgcatggttgattagagtgttaagggttggttcctgttgaaaaacatgtcggcttacatgttttcgcctctcacattgggaattatttagcacgcttccctctattggcaagtgtgtaaagcggcttcacccggaattgtgcgcgttcttcagcggcggcttcctgaaaaaccgccgcgagggtctggtttggcctgtggctcgttcgggttccggtaccgcaggattccgtagtccctcaggttacggatgaattcctgggcattggcgcggaagcgcgcatcgtacatgagcagccccaggaagccctggtttttccgggcgtccgccgtgacggaggcgatttgctcggaagctttgcgcagggcggtcagcgtgggggggatttccttgatggcggggtccaggctgttgagcttttcttccgctccggcgatgattctgcgggcgtcactgacggtgtctttcatggccgccatcgtcgcggggagctgttcgcccgctttgttcatttgagccagcacgctgttgaggtgccggaggttttcccggctcaggatgccttcattgatcagcttggtggtctgggcaagccctttggccgcttccccgatgttgaggatggcctcgtcaatgttgtccgaatttttttcaatctgcttgaggattttcagtatttcctccgtggcgcccacggcgttgttcttgatcttgctgaaatcgctttcaggctgcccgatgatggtggcgtggggcgggatgtattcgtgcgtggggcgtgccgggggaacgatgtcgatgtacttgtctcccaggatgttctgcatgtccacgcggaagacggagccttcctggattttcacgtcgctcaggatgctggcttccagcatgacttcattgccggagggcaggagttcgggcgccttggtgacctttcccaccgtaacgccgcccaggcggagctgggagtccttgatgaggcccgccgcgtccttgaaaatgatgttgatggggtaggtttgctccttggaggtcttgatgttgccgaaccccaggatgacgccgatgatcatcaggattccggcaatcaggaagatgcccacccaggtttccggcttaagtttctgcttcatggctctgtggtaagatggttattgtttccgttcacgttccgcccgttccagcagaacccgttgaaagttttcatgcctgccggtcagggaggcccagtcttccccggaatccccgtacaggaacctttgcaggttttcatccctggaatgcagcagttcctccggggttcccgtccagtaaacttccccgttcctgagatagacgattttgtccgcaatgcggatcacgctgggcatgtcatgggagacgatgacggtcgttattcccttgtccttgcagatttgccggatgaggaagctgatgctgtccgtgacaatggggtccaggcctgcggtgggctcgtcatacagcaggcattccggcgtggtgacgatggccctggctacggctacgcgcttgatcatgcctccggagaggctggccggcattttttcctgctgccccagcaggtccacggagtccagggcggcggagatgcgcgcgtccagctccttttcattccggattccttcctcgcgcagcgggaaggcgacgttttcccctacgctgagggagtcgaagagtgccccctgctggaacatgaagcctattttaccgcggatttgcttcttgattttttccggcgctccgctgatgcgcctgccgtctatttccacatagccgtccagcggatccatcaggccgtccagatgtttcaggatgacgctttttccggctcctgacccgccgatcagagccatcagctctccctttcccacgtcaaagctcacgcctttcagcacttcctgggtgccgaagctttgcttgagctggtggacgcggatgaatggctgcatggcggcgcggaagggttatctcatgaatcccatggggaagatggaattgagaatcatggtcagaatgaagttggcgatgagcagagccacggaggcatacaccatggcctgcatggtggatttgccgacgccaacggctccgttcgtggtgttcaggccttcccggcaggagatggtggagatgatgaggccgaagaccagggctttgaccagggccacggtgatgtcccccatggtgacgaatttgctcatgaagtgcatccagtaagcctggtccacgttaaaggaggtgatactgacgatgtaggcggaggcgatgcccaccagcacggcctccatcatcaggataggcatggaaatgagcatggcctggatgcggggcttcaccaggtagtccaccgggtccacgttcatggagttaagggcgtctacctgttccgtgactttcatggtcccgatttccgctgccatggcggacccgacgcggcccgcaagcatcagcccggtaatgacgggccccagttcccggaacatgcccacggcgacgacggcgccccccatggtttccatcctcaccgtctggagctggaacagggtctgggcttccagcacggctccggtgaacgcgccggtgatgatgaccaccggctgggactgcaccccgatttttgcaatttgctccacaagaacgcgcatccggaatttgccggaccacatgcatgcggccacttggtaaagcagcaatccgattgaccccaggcggtcaaccagccttagagcggcgcggccgatcatggtggctacatagaattgcatggcttctactaatcacttcttccacttcaagagcaagcgcaatgtacgccacgggaagaaaagcaacgcgccgcgtcaatccgtcagccggtggacgtaaggcgtttccggtgcaccgggaatggagcgcagcgtgaggcgcggcggcagtttccggcgcatccattcggaggcgcgggcccggcgctgccagcggcggatttcaagctccgattccgggaagaggcctgccagcggcgtggcggattcatgcgcgcggtgcagacggatgaggaggctgtcgcgcatggccgcatccagcgcgggagaaaggaagccggggaacaggtccgccagttccgtttcatataaatcccccagcggcatgaagtcagcggccagggccggcggaaggaggcggggagcggtcatgatgtccgttccggtcagggcggaaagcagcagggcaccttcctcctgggcccattggcgcatgagccatgcggccgtgaacaggtcatccggtcctccggccgcagcatctgcagggagaggcagcatccgggcctgaatgcccagcttgtccgcacaggcttgcgcccgggcagtgtcctgttccggaatgccggggaggcgggggatgaagcccgtcaagggcagggaaggcagttcctcttttaacagttgagccagcaggagggatgcggagctttccagcaggttcaggcaggcggcgccatgcccgcttttcaggatgaagtccgccgtgcctttccggagggcgtgccggagctgttcttccggagcgggaagcggagaagacgcctccatggaattttccggagaaatgacggcggaatcccgttcaaaaagacgcagccgtttgaggagaatcccgtgggcggaccatgcggaagacgcgccgggtaacagaaacgggccttctcccccggccaggcgggcggtgaggaccggcagccctgtttcccgcgccagccggcaggcttcctcctcatcctgctccagcagtccttcatgccacgcgccggaatgggtgcggagcaagaggcagggtacggaagaggaggccggggaagattccggccatgaaatgatggaaaaacccgctccatccgccgtccggcagatgccgaaaacgggaatggcctccgttccgtgtgcggctggggaaataacggcttgccgtggaaaggaaaggccgttccggagcatgtggaagcggctgccgtccgcgtccgccgctgccagcagcagggggacgtccgctatttcccgggccaggtaggccagagccgccctgtgctgggaccggaaaccgctgcgcagggccagttccccggtgtgcgcgccactgagggccagcggcggacaaagaacgagctccgccccgccgtccacgcaggaacggtacagttccacgatggttctgaggttcctggggaaatggccggggatggtctccggctggattaatcctgtcttcagcatgcgccggcagggtagaccattccggggaggcgggcaagccgggatgccctgcggctttccctccgggcgtttcctgaggagtttttatcgcaaggagcttgtcatccgcggtcttcatggtatgatctgcaccgattgcgcgccgtccgttcccgggcgcatcaatccggaattacttatgaggaaacagtcaacagaggggcaggaatcctccatccagcgtgccgtagcattatggcgcgaatatcttctcccctataagggcacgctggtgtgggctgtgatcggcggcatggtggccgctgtttccagcggcttcggcataccggtgattttgcaggaaatgttccccgtgatctttgacgggaagccgctgcccccgtgggcggagcgcgtgctcctctggtacgtgagtccggaaaacctgccctgggtgacggtgtgggccacggcggccatgctcccgatggtagtggtggtgcgcggcctctcctccttcgtcaatgtctacctgctttccaaaatagggctgggcgtgctggaaacgctgcggctcaaggtgtacagaaaataccaggatttatccctggcctttcatgaccgccagcagaagggagacctgctgagccgcctgatgcaggacacgcagttcctgcagggcggcctggtgcagattgccaatgacctgattatccagcccctgaccctcctggccgcgctgggattcctgatttacagggcctccgtcagccagcagttccttattttgctggcgaacatgctcctggtgggcgtctgcgtgattcccatccgctatatcggcaagaaaatgctcgcccgcgcccgcgtggtgcagtccagccagggggatctttcctccacgcttcaggaaaacttttcctcccagcgggacatccgggcctttgaactggaaaagcagcagacaagtctgttcaggaacaggattcaccgttacatccaggcttccatcagtgcggtcaggtggcagagcctgctgacgcctttgattgaattcgtcagcgccatcgccatggcggccactctctttgtcggcaacatgaacggcatgaacatgggggacttcgccgcgctggctacggccatgtacctttgctatgaaccggtcaagaagctgggggcggtccacaacaaggcggaaaccctgaatgccgggctggagcgcattaaccatgtgctggacgctccggacgacgttccggaaccggaaaacccgaagagtccggaagcctggaagggggaagtggagttcagcaatgtgtgcttcggctaccagcaggatgcccccgtcatgaagaacattgacatccgcatcccggctggccaggtggtggccctggtaggccccagcggcgccgggaaaacgaccttcatcaatctgctgtgccgtttttacgacgtactttccggcagcgtgaaggtggacggcatcgacgtgcgggagatggccaagaaggacctgctttcccatatcgcgctggtttcccagtatcccgtgctgttccgcggatccgtggcggacaatatccgcatcggccgtccggacgcttccgacgcggaggtggaggaagccgggcgcatgtccgccgtggacagcttcatcaatgagacgggggaaggctattcccgcatgatcggagaaatgggggaagggctttccggcggccagcggcagcgcgtttccctggcgagggcctttctgaaaaacgcgcctatcctggtgctggatgaagccacggcttccctggacatgaagagcgaggaactcatccagaaggagattgaaaagctggcttccggacgcacggccttcatcattgcccaccggttcagcaccatccggatggcggaccgaattctggttctggaaaaagggagcgtcattgcggatggcacgcatgaggagctgatggcctcctcccccctgtacagggaactttacaacaagcagcagatggttgcggaagaggaaggaggcgcttcatgttaagacagttttttgagtacgcgcggtatttgaagccggtgatgaagctgttcatcgccgcgctggccgccggggcgctggccgccgccgccagcggtttcggcttcccgctgatgattgccaaggtgttcccggtggtgtttgacaatacgcagattcccccggagcttcagaacatcatcgcccatctggtggccccggagcacatgcacaccgctgtgctcgtggccgtatgttccctgctgccgctggtttttgccatccggggcataggcacgttcttcaatgtgtactggatcagcatcgtcagcatgaaggtgctggaggaaatcaggctggacgccttttccaaactgcaaacgctgcccctctccttcattgaccgccagaaacggggggacctgatcagccgcctcattaatgacgcggccaacgtgcagggaggcctggtaatagcggccaatgacatcatcaaacagccccttaccctgctgaccgcactcgccttcctggtgtacaaggtctttgttgacccgaacacggcggtggtgctgatgaatctggggctggttgtgctggcgatatggcccatccgcttctttggccgccgcgtgatgaagaaggccaagcaggcgcaggacgagctgggcaatatcacggccgccgcccaggaaaacctggcggcccagcgtgaaatccgttcctacggcatgcaggaacagcaggtggggcttttcctggggctgatccaacgcttcttcaaaatcaatctgagaacggtgaagtacaggcacttcctggtgccggtgctggaaatggtgacggcgctgggcctgggcattctgctggtgaggggccatgaaatgggaatcaccaaggctgacttcacggccctggccgcggccctgttcatgtgttacgaccccctcaagcgcctgggcgtgacgctgaccaacctgaaaagcgcgcatgcctccctggaacgcatcaactacctgctgaaggagccggacaccatgccggaagccgccaatcccgttcccctggggcgagcctccgggcgtctggactatgacggcgtttccttctcctacgacggcgcccgcaaggtgctggacggcattgacgttcatatcagccccggggaagtggtgggcctggtaggccccagcggcgccgggaaaaccacgtttgccagccttctgcccagattttacgacgtcagttccggcaccctgcgcatggacggcgtggatgtgagagacgcctccctgcacgatgtgcgcaagaacattgccttcgtttcccagcatcccgtgctcttccacagcaccatcatggaaaacatccggctggggcggcaggacgccacggatgaggaagtgatggccgcggcgcgcgccgccgccgcagacggcttcatcatggggatgccggacggctaccagaccatgcttggcgacggcggcagcggcctgtccggcggccagcgccagcgcgtggcgattgcccgcgccttcctgaaagacgcccccgtcctgattctggatgaagccaccgcctccctggacgcggaaagcgaggcccagatccagcaggagctggaccgcctggtggaaggaaggacggctctcatcgtagcccaccgcttcagctccatccgcgtggcgacgcgcattctggtgtttgagggcggccgcatcatcggggacggcactcatgcggaactttatgcctcctgcccgctgtaccgggaattgtatgaccgccagtccctctaggtgaaagggggggacggagacggaaggcttttcccgcgcccgtgccggagcgcacatggcggtttttctcaggccatggtggaaagagctattgtcaaacaagggccatgatgtactattccgccagcatgaatacactggatgaatccctgacgaatgccgttaaagagggggagcttttggagtcttccctgaccaatatccgccttctgctggccggaaccaaatcccccgtagcgcgtgaggccgtagaggaactggccgccgccggggagtggcaggaattgaatgaccgtttttacaagaccctggccttcggtacgggggggctgcgcggccgcaccatcggcagcatcgtgacccgggcggagcaggggaacggcggcgtgaacggccgcccggaatatccttgcgtgggaaccgcctgcatgaactacttcaatgtggggcgagcgatgcgcggcctgatcatttacgtgaaaaagcatgtggaggctacggacccgggcaggaagccccggctggtcatcggccatgacacgcgccacttctcccgtgacttcgccgaattctgcgcgaaaatcggcacggacctgggctgtgacatttacctgttcgacagcccccgggccacccctgaagtttccttcgccatccgtgaactcaatgcggattccggcgtggtgctgaccgccagccacaacccctcccacgacaacggcttcaaggcctatttcaacgacggagcccaactggtgcctccgcatgacaaggccgtgattgaggaagtgaactccctgacctctgaggaatatgaaccgctgccggaagaccggcgcggcacccttcacgtgctggacgcctcctttgaccgcgtttacatggaccgcctgaaaaccgtgctgctccgtccggagctcttcagcaagggcggcgccaaaatcgtttactccaacctccacggcacgggcggccatatcatcgttcccctgctgaaggaactgggctgcaacgtgcagaccgtggcggcgcaggacgtgcaggacggccgcttcccgacggtggcctcccccaacccggaaaaccctccggccctggccctggccattgagcaggcggacgcttccggcgcggacatcgtcatcgccacggacccggacgcggaccgcatgggtgtggccgttcgcggggaagatgggaaaatgcacctgctgaccggcaaccagatcggctccctgctggcgtggtaccgctgcatgagcatgtccgggctgggcatcatcaatgactccaaccgttcccgcgccgtgatggtgaaaacctttgtgacgacgggtcttcaggacgccatcggccaccacttcggctatgaagtggtcaacgtgctcacgggcttcaaatacatcgcccagaagctcggcaaatatgaagaagccattcctgcggaaaagcgggaaggctaccggaagatgagcgaggaacagacgcgcgccctgcgcctggaatacagccgctactttgtcttcggcggggaggaaagctacggctacctggcccaggacttcgtgcgcgacaaggacgccaactccgccgccatcatctttgcggagctggccgcctatgcggaaagcgtcggcaagagcctgctggagctgcttcatgaactctttgaacaattcggcgtgtacctggaaatgggcaaatccctggtcatggaaggcgcggacggcgcggcaaaaatcgccgccctctccgcctcctattccgccaatcctcctacggaactggacggcgtggccgtcagcggcatccgggacttttccaagggtgacatggtggatgcggagggcgaccccattccggcggaaaaaatgatctttgtggatatggcggacggcagcagctttgcggtgcgcccctccggaacggaacccaagatcaagtactacctcttcggccacgggaaaccgggcgctccggtgaaggaagccctgccggcggtccaggcctccctggactccctgtgggctgccgtggagaaggacgccctcgcccgttccaacggctaaatgttgttgatttctttcccccgtctaccatgtaatgtggacgggggaaatttattttcttgccaaggaggccggaattccgcagtttataattcttatgacatttgcggtccacaaaactctctccgtggccggtgcccttttggccggtcttcttctctcctcctgctcctccacctcccaacaagtcgaagctccggcacggctccccgcctaccactttgttcccggcaagacagccgtgctgcacaacgggaaagccattccccccaggaatgcccccccgcaggtcaagcgcgccattgcggccgccaattccctggtcaacaagccctaccgcctgggcggcggccacaggaaacactatgactcccactatgactgctccggcagcacctcctttgtactgaaggaagccggcctgctcacttccacccgccattccaagctgttcctgaactacgggcagaaaggcgccggggactggatttccgtctatgccaagaacgggcacgtattcatggtcatctgcggcctccggtttgacaccaccggaagcggtcgccgcggcgaaggcccccgctggagggtggacggccgcaatgcccggaacttcttggtgcgccaccccacgggtctctgatccgggcctgcgcgacggaaaaccgcgttttttgcgtatgttcgcgcaggctttcttgaacaatggaaagtaatgtgctatcaggtgcgaggacgttgatagttccttgactttcatggctaagacaaaaattcacgtagggcttgagatagggacaagcaagacttgcatggttgtgggcgaagtgaagcccgacgcgaccgtgacgatcatcggcgtgggtgaggttcctagcgagggcgtggtccgcggcgagattgaagacacctccaaggtcatccagtgcatttacgatgcctggaacatggcccaggaccatgcggacgtggacatcatgaccgtctatctgtccgtgactggagcccacatcgtggggcagaacaaccgtggaaccttccgcctgcctccggatgaaagcatcatttcccaggagcacatggacgaggtgacggaaatcgcccgtgacatcgccctggggccggaacaattcgtcctgcaccgcgtgcccggccttttctccgtggacgggcaggaaaacctgaccaatcccgctgggctgaccggcaggaccctggacatcgactgccatatcatccacggcatcaaatcccgcatcaccaactccttccgctgtgtgcgggaagttcccctggacatcgcggacgtggtcttcgccccgattgccacggcccagttcgtgctcaacaggcaggtcaagcaggcgggagccctcctcattgacatgggggcgggcactacggattacgttctttacctggacggccagctcgtggcctccggatgcgtgcccctgggcggcgaccacatttccaatgacatcacgctgatgaccggcattccgctggcacaggcggaactgctcaagaaaacggagggtgatgccaacagcttttccggaaagaccaatgaaatggtgcgcgtgcgcggggaaggaaacatgaaggatgccgccatcgaacgcaatgttctgaatgaaatcatccgttcccgcctgctggaaatcttcaatctggtcaaatcctccctgcccaaggacaccttcaagggcaaccgctgccacggcgtctacctgtgcgggggcgccagcctgatgcgcggcgtgggggaactggcctcccacgtgttcggcgtggcgatcagccgtcccacgctggtcaaaaacggagcgccttcctatctggatgacccgcgttactgtacggccatcgggctgatacggtatgcccagattctggatgccgagctgccgcagcagcggagctggctggggcgcgtgctgggcctcttcggcaggaagaactcctgatcaatctctaccccaattaaaaaccatgctggaattttctccccaggacccgtccgggctatccggaaaaatctgcctgtgcggcattggagccgcaggcgccaaggtgatggaggaagttctgctgctggctccgcaggcggtttccgtgtgcgccatgaatctggatgcccgtttgctgaacgcctccgccgttccgtgcaaggtccatctgggggccaggcttacccgggggctcggctccggcggggatgcctccgtgggggcacaggccgcctgtgaaagtgaatcctccatcctccgggctctggaaggcagtgcgctgaccgtcctcgccgccgggctgggaggcggaacaggctccggcgtggcgccggaggtggcgcggctggccaaggagcagggctcctacgtcgtcagcgtcgtcatccgccccttccggtttgaaggggaccgccgcgccgcccaggcggacgaggcgctgtcccggctggccctgtattccgacatggtgctgcggtttgacaatgacgccatggaaagcctgattgatcccgacaggggagtgttggaagccttttccgtggtcaatgccctcattgcccgcgccgtgctcatcgtgccctcccttctcaactcttccggaagcctgctccgcgtggggctggatgacctgctccgcgtggccggaacggggaagggaatttgctccttcggcgtaggggaagcgtccgcggacgtttccacggcggacatgctggaccaggtccggcattctccccttttcctggaaaaacggctgggggaagtggacgatgttctggtgctggtgcgcggcggcaattccctgaccctgaaacgcctggaagcgctggctggcggagtggcggaaatcctggggagcggcgtgcgcctccatatcggcgcttccgtggcggaacagccggaagaccgcctgtccctgaccgtgctgggcgttgtgcccgtgaatgaaccggaaatttctcctgctcccgttttccgtagggaaccggaactccagacagttcttgtgccggaggaagaacccttcatcggggatgggaaaaccatcattcagcctgtggctcccgccgtggttcccgaaccggaacggcgcccggagccggaacctcccgtttccattccctccgtcagaagggatgaccatgaactggaagaggaactggtgcctgtaaggcctgttccctccgtgccggacgtggaggaaacgttcccggaacccgcgcctgcggcgcaggaacccggagcggatgcggaacaggaattggacccggttcccgacatcaaggaactggaagaaggaactcccccggaagaaggagaggaagagcgcgcgggacacggactctttgcccatgtacgccccctcattctggacggggaagacctggacctgcccccggcgctgcggaagaagaaaccggacccgagctgatgccgtctccccgtacgtccatggtatggttttgggcgctggttgcagccgccctgctgtatgtggcgttgcttagctggtggagccccttcacctcagacacgtaccatcacgccctgacgggcatggaacaccgtttctccctcagcctggtctgggaacgctgcgtggcctcctacatgagctggaaccccagaatcggggaatacctggcctttgccgtggcgacagcgggcaaatggctcttcattctgctcaacccctttgtacaggtctgcctcgcgctgatgatgttctatctggcctccgggcgcagggtggacccccgttcctggccggacgtgcggctcttcggattggcgcttctcctgctcttcacctgtacggcccggcccggcgtcacgatttactggctctccggcgctaccaactattcctggggagccgccctctggctcggtttcctgtgcctgtaccggggattgctggaaaatcgggaaaacggggaaaaaggaaagcctgctaaaaagggtgtcgggcagtgggctggcgtagtggtactgggattgttggcaggcatgactaatgaaaacaacattccgggaacctggcttctgctgggagccttgtttgtcttcgtccgcctggtccggaaggaaaaacttcccttgtggttttatgcgggcgttgcggcgcaggtagcaggttctctgtgcatgttgcttgcgcccggcctctctgcgcggatgcactccgccactcccggctgcgcggaacccctctccggcgtttgggacagatgggaagcggtccccgcgctcctgctccggatgcatgaatacctagcccttcccctgctgctgggtgcggtggctgcctggatgctgtggagaagtttccgcaggaaccggaatgccttccggccatggaaaattttcatcggaatagcggcagcatacattctgacggcgtatgccatggctctttcctttgccgccgccgtcgttccggcggaccatgccatgttctccgccaccctgctgttcggcattggcgttttggctcttctccgtgtgtggtacggcattcccgccgcggagccccgtccgcggatgactgtggccgtttttctggcgctgtccggaatatgcgttctttccacccttcacgatcacctgcttctgttccggcagcatgaaaagcgcgtccgcctgattctggaacagaaaaaggccggctttcgggaaattgtggttcctcccctcgttccaccctccccgtggtgctccttcatcttctgggtggacctgtcgcaaaacccggaagactatgtcaaccggggcgcggctgtgtattacggggttcacagcattcatcttctataggttcctcactttcataccacgtattttttgccgttggtggcagaaatacgatgaagggaagatatttttctgcctgtggaatgtactgacgtctgataggtgatttattgttgattttggagaaatatttcattatactccaaggagaaggcaatgtgaaatttttatcaataccctatgatgaaaaggtggcattctacaccgttcacaaccaacagtatctgatgccatgatcggaatttccaatgattttttgtccaacgtgcttcattgcaccaccctgatctctgcaaagtcttgtgaaggtgcggaattcacggcaacaggatttttttataccagtgcaaccaaagggttattactggttacaaacgcacacgtcttggaaggtgttgagaaaatgaacatcaccctgacgcctaagaatgaaatggggtttcctgattttggatataaggaggaggtatttgtagattgctcggcggagaatatcttctttcatcctgactggaaaaaggacaaggggcgttctgttgatttggccgctgtaagaatcaatgaacctctggggttgaaattttatatatcatctaccagtaaagattttattctccaagagtcggagaaggaattcgtaggatgcattgaggatgtactaatgttgggatatcccagaggcctcattgacgtggaaaataatcttccgatagtccggaggggaattaccgcaacatcaatccatgtggattattgcggagtgccctcatttcttattgatgcagcatgttttccggggtccagcggatcacctgtgttcatcattgttcctcctttgcgcgtagatgccaccagaatgagtatcaatacccaggggacagtcaaacttgtgggtgttctttcgcagtggattccagatgttagtgagtaccgtgggaatgtttatattcttcctgatcctccccccgttcctgtagccgggggacacgacgcaagaagcgagatgtgtgttagagtggggattcctcttaatttggggaaagccgttaaagctaaggaaatcatagaacttgaaaagcaagcggctcatgatggaagaaaagtctcctggtctctctgaaagtcaggaaaaggaaaagctggcggttcccctttcgcgcaggaagaatatcctgtacgcaggagctgatgatttagacaaaagccgggagattaaactggaagaaatcgatcctaaaaagttgttggaaaaggctcagctcgtccggttgtcagactccaacaagaaaaattatgttgtcattaaattttcctatgttctttatgacgttgctgccgggaaagtaggattattctctagagaagacgtcaaccatcattttgaaaaagccaagcactctttattgctttcttcgggactggaacaattttatggagccatttacagtgggaagaagattgttttaaatgcgtatcacccttttacacaaaagataggagcttatgtgaactgtttttggttgccgttcgtttcctaccgtgaattcccctttccggtaagattcaacgcattggctttccgtaaaaaagaggggaggcattacgccttttatattcattatgcggtattgaaaccgaattccttgtttcccagacgtccatttgaacttcattatcctggttttagacctgtcaaagataaattccttggattttattcactggctcaagccgaaaaaaagttaaaaggaagcacacttgaggctgataaatttgcattacgccttcttttaggaaaagaagatcattatactgttagctcggatcatttttttgggagaggttttcataagggctccatttcttccacgtcggagggtgttatttcattgtgagaggaattatccctctctatgtttcaattcatcggaatcgcgtaagagtgcagttttttgaattcgcttccttgcgggccttggtccgtgatgccgttgttgggggcggcataggtgtccagagtcatggagtccgggtagatgttcaggatgtagtaggccgtgatgccggagcggtattgcagggtttttacgcgggattttgcgggcagaaggaaggggatgggcagcaccttgttgcccgcgggggcgcagatgagggaggtgagggtgtttttcccgtccggggatgtaatcatgtacaggtcgtgggcatgcaggtgcccggtgacgacgaaccgaacgccggcgtcccggaggttgcggtaaaagatgttctgctgttccgccgcgctgtcgttgtagcggccccacaggcattcccggaattgcatgggagtttgcagggtgcggtgggtgaaaattaggcaatggcgcggaacggtgttggcgttgctcctgttgcgtttgacccatgcgctgaagtccacgagctggtccggggtcaggtcaatgtccatgaagtacagggaggcgtttttatggcggatgccgtagttcagttttttggtggccagccctttggcgccctgtttccgggtaggcaggaagagttccctgaattgttccgcgcggaagggcagcgattcatggttgccgcgcacggcgtagaaggggatgcctttttcctccagcatcttgttgagttccttgcgcttggcgagtccgttgatgggggcgcttccttcaatgtccgccatgtcccccacctggacgaccatgtccacctggtgcttcaggatttccccatagagggttttgatgaagttgacggctaccccttcgcttccttccatgcgtttgggggagtcatgcgtgtcgccgatgatggcgattctccacggagcgggttcttccgcgtgcaccgcttgaaacagaaagatgagaaatagcgcaagatatttcatggcaccccgtttttaccgcccgcctgctttccaggccagaaaattatgcatgcgccggaagaaggccggacgggtgcttctctttttccttttaaaggtggcagttcggggctggccggaaaagctccacagcagttagaaccatgagagggatactctttttcaccggagaaacaggtcctttgacggattttattggcggaggaatgagccattgtgaagaccggcttgccgggcctccggaaggttttaccctcttttcagtgaagaggcgtttttctattccggttgccgctgcccggaggggagggccgtcatccccttgcagggaatgcttttccgttttttcccatcagtgggaaacggagttggaaaagatattgattaccaatactccggcaatgatgagcgccagacctgaaatcgccgccaagtccaggtgctgcttgaatgccacccacccgatggcggagatcagcacaatgcccattcccgaccagatggcatacgcaatgcccacagggatgtttttcagcaccaggctgaggcagtagaaggagccagcatatccggctacggttatgatggtgggcaggagcctggtaaattgttcgctctgcttcaggaaagaggtggcgattgtttccagaacaatcgccagcaacaggataagatatgctttcatggattcgttcctgctaaggcatcgcgccgggaaccgccaatgattatgggcatcgtgaagatttgagagagtaaaagccaggcatttgagaagtcaatgcccggcttttgatggagcggacggcttcggtcggaggctactgtcaatggacttgcagggctttggcctgttcttccgtgagttccacgcagtgccagggaaggccgcgcttgttgagttcgtccatgaaggggtccggatcgttctgctccatgttgaagacgccagcgccggaccatttgcccgtaaggatcatttccgcgccgatcatggccggaacccccgtggtgtaggagatggcctgggatcccacttcttcaaagcatttttcatggtcgcagatgttgtagatgtacacggccttgaattggccgtccttggttccggtgatgacgttgccgatgcaggtttttcctttcgtggtcttgcccaggtcccccgggtccggcagcacagccttgaggaattgaagcggaatgatttccactccattgtacatgaccgggtcaatccgggtcatgcccacgttctggagcacttccaggtgcttgaggtagttcggggagaaggacatccagaattgggccctgcggatggtggggatgtgcttgaccaggctttccatttcttcatggtacatgcggtagatttcataggtgcccacttcctgcgggcaggtgaagctccggtgcatgctcatgggggcggtttcccggaaggcgccgtcttcccagtggcggcagggggcagtcacttcccggatgttgatttccgggttgaagttggtagcgaaggccttgccgtgattgccgccgttgacgtcaatgatgtccagcgtatggatttcgtcaaagtggtgcttgagcgcccatgccgtgaagacattggtgacgccggggtcaaagccggagcccagcagggcaaagagtccggccttgcggaatttgtcctggtacgcccattgccaggagtattcgaatttggctacgtcccggggttcatagttggcggtgtccaggtagttgacgccggtttccaggcaggcgtccatcaggttcaaatcctggtagggaagggccacgttgatcagcagctgcggcttgacttcccggatgagggccacggtggcgggcacgtcgtccgcgttcacggcgtgggtggtgatattgacgcccgttctggcgcgtacatcgtccgcaatggcgtcacatttgcttttcgtgcgggaggccagatgaatgttttgaaagatgtccggcagttgggcgcatttgttggctaccacatgtccgacgccgcctgctccaatgattaaaaccgtgttcatgatatgcccagtacataagtgaaaacagtttgaaaggcaaccccggatttggtgcaataatgacactgccttcccacggtccaaatggccgttcccgtcggctgccggacggcgttttccttgcggaaggcgcggccttttggaaattttccaaaaatgattgaacaagagattgacgctggatgtcggactcttcaatattgaactgtagatatgattagacaaattctgccaatagttgttgccgcctgcgtcgctccctgttttgccgcggaaggatggattaccgatatggatgccgccaagaagcaggccgccgaacagaagaaggatctcatgatcgagttcaccggttccgactggtgcccgccctgcatgcagctccgcgccaacgtgttcagcaagcctgatttccagaaggacgcccagaagaatttcgtgctcgtggagctggattatccgcgcggcaaggaacagtccaaggaaatgaaagccgccaatgacaagcttgcccagcagtacggcgtgcaggggttcccgacgatcgtgtttgcggacgcttccggcaagcccttcgggggatttgtgggcggccgttccaaggatgacgtgatgaaggccatgcaggacgccttgaagaacaaggaagccctgaacgccgctgaggcaaatgtagccaaggccaccacggatgaagcgaaggttgccgccctgatggaagtgctcaagctggcgccccaggagtatgtggacaatttttacggcgacgtgaaggcggaaatcaagaagctggacaaggatgacaagtccggcttgaaagccgctgacgcgcacgccgaccagcttaagaaggaacagaaggacgtccaggattatcttgccggcaagctgacggacaagaccacgcctgcggaagccctccaggtggtcaaggcttatcccgaccgtgacaagcttctgccggaaacccagcaggatttgctgatgatggagttcgggacctacctgaattccactggtgacgtagacggtgccgtgctgattctggacaaggtggccgaattgatgccgggtacggaagccgggcagcgtgctccccgcatcaaggccggcattcttgccaacaaggaccagatcaaagctcagattgaagcagccaagaaggcccagagcaagtaagtaaaagctccctttccttgatcccctgatttgggaaaacggccccgcagcggttcatgccgctgcggggcttttctttttttcgccatgagctgctcgcttaagcggcttccgttgagagggtgcccgtcagttcccgccgggtggcataccggatcagggcaatgtatagggggcgccgtggagtttgtccgtgtccacggtgaaataaacggcgtccttgagcttttcagacagctccttctggagtgcgtccacgttttcctgatagctttttccggggtcaaaacggttgttgatgctttccgcctgcttttccgtaatgaccgggcctatccacgggctggcaatcgcatccttcgtgccgccgcccacgatgatccggaaatattttccggcgtccttgtccgtcagggtataggattccgcgtccttgccctgctgcaccagcacgggctttccggtccgggaatccgctttttcccattggatgacagggctggcgggttcgtcctcaggagtgctgtagcggctctccagcgtggttccgaccacttcctccccgttaatgtaggctctgagccacggagctacgggctctccccaggccggagtgaggagcatccccccaaatgcggtcagaagacagaaggcatggtttttgagtttaaacatgggggaaaaattaagggaggaacagttgggaaaacaggataaaagagactgtttcagaaaagaccagtgggaccagtggaggcggtttccgggatttccttccggtagaatcctgtgggggatgggaaggcggcccgtcatgcatctgaggcgggggaggacaggcggcgtatttgcccaggcttcccggcgcgcaagcgcttcttttggacggtttttgtgaagatatcctgcggcggccggtttttcccgcgggaagtgtttcgtgcccgttgttggtttggttcaggagaggaaccgcctccctgccggcaaaggaatgtccacaagtacgggccggccgtggacggagcggcatgatgcccggcagtggcggagggagggatttccgggaagattccgtgggccgcggcgcggcggttgtatttcttgaggtgaagccttgcgcgggggaaggaaacctgacagaatcccgccatgcgcctgttcatgatgttctgtgtgatgctgctgctcgccggatgcgatacgcgtaccagcgtggaacgggcgcaggaggaaggagtgctgatcgtgggcaataatgcggaaccgcagagttttgatccgcatattgccacctccgtttccgatttcaagattatcaatgccgtgatggaagggctgctgcgcggggattccagggatgacgccgtttttcatccagccgtggcggagtcctggacgcataatccggaggcggacaagtggcggttttccctgcggaaggacgccgtgtggagcgacggcgttccggtgacggcccatgatttcgtttatgcctaccaccgcctgcttcatccggagtttggcggaaggtatgcggacatgctttatccgctgaagaatgcggaggcttacaaccggaacaggcgcagcctgctgctgtgcggccccggttcccggctggccggggaagcggggctggatggagaggctctggcacgggtggattgggagaggctggacggcatgggcgcccgggagctggaggcgctgcggaaggatatttcccggatggagtggccggacggaatgccggaggaaggcgcgcggagaatcgcagcccggatgctggaggatgtccgggccggaagaccggatttgtgggaggaggcccgtgtgggcgtgcgcgccgcggacgatcataccctggagctggaaatgcgttctccgatgccccagcttcccctgctgctgcttcattgcacctggtttccggttccccgccatgcggtggaagcccacggcggcatgctggacaggacggggggctggacgcggcccggcaaggctgtggggaatggtccttttctgatggcggagcaccgtttcaatgattatgtggaggtgcggcgtaatccccgctaccggaacgcctcctccgtccggctgaacggggtccgttttctacccaccgtgaacggctttacggaaacccgcatgtttttcaacggcaagctccatgtcaccaataacgttcccccggagatgacggcgtacgcgcgggagcgcggcggcggtgatttctgccaggatgattattacgtgactattttttaccggctgaatacgtcgcgcgcgccgctggatgacgcccgcgtcaggcgtgccctttccctggccgtggaccgggagaccctggtgcgtgacgtggtgtgcgggggcggccagccgtgcttcggctttacgccggacggcgcaggctacaagacgccgcacggggtggagttcaatccggagaaggcgcgcgccctgctggcgcaggcgggtttccccggcgggaaggggtttccgcggctggagttgatgaccacgtccagggaggtgcagaagacgatggcggaagccatccagggcatgtggaagaggcacctgggcgttcacgtggatatccgttcctgtgaatggacggcctacaagttcgcgcagaattccatgcagtatgatttcagttcctcctcctggtccggtgattatctggacccgtccagttttctggatttgtggagctccgcctccgggaacaacaacacaggctggtcccgcccggagtatgagcgcctgctggcggagagccgcgccacgggagaccaggagaagcgcatggccctgctggcccgtgcggaagcgctgatgctttcggagtctccggtgattcccctgtactgggccaggcggtcctatttgaagaggccggaggtgcggggatggcatcccctgctactggataaccatttgtttgaagatatcagcctgggcgcacccagggagcaggggaaggaggccgcgccttgaccaggatgattttgaaacgcctggggcaggggcttctggtcctgctggtgctggagaccgtgacgtttttcctgatacgcctgctgccgggccaccccttcatgggggagaagaagctgccggagcacgtcctccagcagctccaggctagctacgggctggaccagagctccctggtccagtacgggcgctactggtggaacatgctggtccatggcgacctggggccgtccctggtgaaggagggcatcagcgtggcggacatgatcggccagtcattcccggtatccctccagcttggcgtcataggcatggtgatttccattctggtgggcattcccgccgggatcgtggcggccctgtacaagaaccggtggatggactggtgggtgatgctggtttccatggccggcatctgtattcccgccttcgtggtggctccgctgctgggtgtggcgctgggcatgcatgtgcccggcctgagcgtggccggatgggattctcccggctgcgtggtgctgcctgcgctgacgctggggctggtgaatgccgcgtatctggcgcgcctgacgcgcggcggcatgcttgaggtgctgggacaggatttcatcaggacggcccgcgccaagggggctgcccccttccgcacggtctggaagcacgccctgcgcggcggcctgattccggccctttcctacctggggccggcctttgccgccatgattaccggctcctttgtagtggagacctgcttccaggttccaggcatgggccagcatttcgtgaacgccaccacggaccgggattatttcctgatccaggggcttgtcctgttttacggcatcctgatcgtagcggccaacctggccgtggacctggtgcagatggccgtcaaccccagattgagggcggagtcatgaagaacagggaatggaacagcatggaggagcagggctcctccctgtggaaagacgcctttctgcggctttcgcgcaaccgcgcggccatgttttccctgctggcgctggcgctgattgtggcggcctgttttctgggtccgctgctgccgtggctgccgcatccgaatgtgcaggacctgtcccgcattgcggaaagtccttcctggcagcactggttcggcacggaccagctcgggcgggacctgctggcgcgcgtgctgtacgggggccgcatttccctgctggtgggcgtggtggccacgggcgtttccctggtcatcggcgtgacgtacgggctggtttccggttatgccgggggcaggctggacgccctgatgatgcgcctggcggacgtgcttttcgccctgccgttcatcgtgctggtgattattttctccctgtccgtggaggaacccgcccagcagctgacgcagtgggtttccggcgtcacgggctggtccgtggagatggtgagtcccatgaccggattgattcccctcttcatcgccatcggcgcgctgggctggctgacgctggcgcgcatcgtccgcacgcagacgctggagctgaaggggcaggagttcgtggaggcggcccgctccctgggcatcgggcacatgaaaattctgttccgccacattgcgccgaatttgttcgggtccgtcatcgtgtacacgacgctggccgttcccggcatcatgctgctggaggctgtcctgtccttcctgggcctgggcgtaaaggctcccaattcttcctggggcacgctgatcaaggagggggcggaccgcatggaggtgagcccggaactgctcctgttcccggcgctgctgttttccgccaccctgctggcgctgaatttcctgggggacgggctgcgtgacgccctggaccccaagtcttccaaggattgacgcttttgaataaaagacaatgaaggttgctttaacgatttccatgctggtggtctccaacgtttttatgacgtgggcgtggtacgggcatttgaagaagggttccgcggcggacgacaagcccctgctgctgattatcctgatgagctggggcgtggcgtttttcgagtactgcttcatgattcccgccaaccgcctgggcaatgcgggaggccttaacgtggcccagctcaagatcatgcaggaggtgatcaccctgtgcgtgttcatccccttcgccctgttctacatcggggagaaatggaagtgggactacctgtgggcttttttatgcgtgctgggggccgttttctttgtcaatagggagcgtttgctcgggtgacagacttttttcgttcgcattcctctttcagggtggtcttaccatttagaaagatgaatatgaaaataatacctattcttgcagcagcagccgtagccgtcctggccgcaggctgccaccatcgccataataataatgattattaccgccccggtccgtcgcaccattataaccataatgattataacaacggctggcatcacgggcagaacaggccgggtcccaagccccgcccgcattacgtgaccgccaaccaggcttcctatccccgcctgtaccagctcatgtagtttttgcggttccgcaggaacgccgccgcttgcggaaaagggcagcgtaaaccatggagcggcgttggcgggaagggcgtgtgaagggacgcagttttggcatgccgttccctgcatggcacggataccacccccgggccgcccgcttcccggtaccggcacgggctccggagggccctttgccgggcctgatgcttcgcgcacaggatataagcttgaaaaggcgcggtgcccccggcactctatgcgccagatcaatgactatagatgagcaattagacatattgatgggcggtaccgccgtcgtgatcagccgtgaagagttgaaggagcgcctcaagctgggccgtcccctgcgcgtgaagctgggggtggaccccaccgcgccggatattcacctgggccataccgtggctattgaaaaactgcgccagttccaggaactgggccaccaggccattttgctcatcggggatttcacggccaccatcggggacccctccggccgttccgtcacgcggccccctctttcccgtgagcaggtgctggagaatgcggagacgtacaccaagcaggcgttcaagattctggaccgggacaggacggagatcgtctacaacggggactggttccgcaagatgacgtatgaggaagtgcttaagctcaattcccgcgtgaccatgcagcagatgctggcccgggaggatttcaaggcccgcgtggagggcggcaaggaggtgcgcctgcacgaaatgcagtacccgatcatgcagggctgggattccgtggaaatccggtcggacgtggaactgggcggcacggaccagcttttcaacatcctggtagggcgcgacctccagaaggaggagggcatgctgccccagatcgccatgacgatgcccctgctggaaggcctggacggcgtgcgcaagatgtccaagtcctacgggaattacgtgggcgtggatgaagcgccggaaatgatgttcggcaagatgatgagcgccagcgacgagctgatggaccgctattaccaggtgctgctgggcgagaagcgggacatggggctgcacccgatggaagccaagaagctgctggcctggaagattacggcccgctatcacgactccgccgccgcggacgccgcccgcgcggactgggaaacccgtttctccaagagggacttggccgccgcggatttgccggaagtggaaatcgcctccctgcctgccggcatgaatgcgctggccctggtggccttcctttttgagaacgttttccaggtgaagaagtccaacggcgttttgcgcaaggagcatttcacgcccggcgccatccagttgaacgacgccaaggtgacggaccccgccgccgtgccggagctggcccccggcagcgttctgcgcctgagcaagaagcacgccgtgcgcttcaagtagggagccggaaacggcgttcacctttcttccttcctccatgccgggattcctttccaaattggaccgctttaccgtcggcctcatcgtcagcgtgagcgcggggattctgattccctgttccggcgtgtgggatacggtgttcagccgcttgagcgatgcggccatcatcctgctctttttcctgtacggggccaagctttcccgccgctccgtatgggaggggctgatgcactggcgcctccagggcctggtggctgcaagcaccttcgtgattttccccctgctgggcattctgagcatgccgctgtggaacagcgtgctggggccggatttgtgcatgggcatgctgtacgtgtgcatgctgccttccacggtgcagtccagcatagcgttcacctccatggcgggcgggaatgtggccgcggccatctgctccgcctccgtttccagtctgctgggagtgttcctcacgcctctgctggtggggctggtgtggtcccgcggaggggaggggggcgtggatttttccaccttcctgaacatctgctatattattctggtgccctttgtggccgggcaggttgcccagcgctggatcggcaaatgggtggtcacgcaccggaacattacttcctggacggaccacagcacgatctggctggtgatttacacggcgttcagccatgcgatgattaacggcgtgtggaagaacctgccctggctctccctggtggaggtgcttgtcttctgcggcattctgctggccgcggccctgtggctgacagccttcctttcccacaagttgcatttctcccgggaggaccgcatcgcgattattttctgcggctccaagaagagcctggccaccggcatcccgatgatgaacgtgatttttgccggagcgcccatcgggctgctggtgattcccatcatggttttccaccagctccagctgatggtctgttccttcctggcccggaagtgggcgaaggacgtgggaaagggagacaagctgtaaggcggcctccgcttgccggtcaatgcccggccaggcgcaggactccgtcgcactgcatgtcccggccaggaacgactacatggctgccgtaggaggggattttggccgtgacgggcttgttgcggaatttggacatgaaccgctggaagggctccatgtcctccgggatgatcttcacttccgtataggcggggttggacggcatgtccgtgatttccacccggaaggagcctacgccgttgccgtccggcgtgtagaattccaaggattcctccggggtggaggggtgcatgaagaacaggaagagcatgatgcccagggccgccagggtgacgacggtcagcggaatgttttttctgaggggactgatgtgcatgcctgcttttcctttcttccataagattatgggttttactgggacgtgtcaacccctccggaggaaagccatgacgcggagccgctccatgttcttttggcggaacgggttccggcggagcaagggtggacggaaaaaggattgcgtccgcgggacaatgtggtagcttgtgcggacaaagggagccctatgaccgtgcccgtaaagatactgtccgtattgacaggactgagcctggccggaagcgttcaggcgcgcatctggacgaatgaccggggcgctaccgtcgtagccgtgctggtggccgtccgtgatgcggaggtggacctgaagcttcaggacggccggatagtagccgttcccaagaacgttttttccggcgccgaccaggcgtatatcctggaatgggtgaagtccggcggcacgcttcccgatacggatgtgggggcggagaaccctcccgcgcagggtgcgtccggcggacgttacgttcccctggagccgaattgggacgctccgtggccggagagggcggccgcgcccggctatctgctggtgaaggccgtgcaggagacggatgagctgagcgtgtatgaaacggaccatttcatcattgagtcccccggaaaattgccggaaacggaacgcatggccctggcgcggcgttttgaaaccattctgtctgccctggcagctgttccgttgaatctggcggtggcccgccggccttcccgcaagtatctggtgagggtatgtttccaggaagaggatttcaacagggctccgggcctgcggaacgggcatctcaagttttcccctaccagtttcacggccctgctgttgcgggataagaagggaaagccgctgaagctggacgcggtggatccgcgctttgccgtcacccactgggtggcgcagtccatggacctggaacactggctggtggacggtttttccgcgtacatggcttttcttcccatggagaaggaggcgatggtattccggaagcttccgggaaggctggctgccatgcttccccgcgccgtgcgcacgggcagggagccgctgcctgccctggcggatctgctggcgcgggattccgttcattccgccgcaggccatggcctcccttcaaagggggacgcgtcccggtactgggccgatctgttatggacggtgtactggtgccatctggaaggggacggcaaggcggaacgcctcaggcgttacctggaagcctgggatgcggaggacgtcaacggggcgcacgccgttctgctggacgggaaggctccggaagaggtggagcgggaaatggccgcagcctggaaaaaactaggcgtgaagctgaagttttcaccgcccgcccctcccgctgcggacgggaaaaaggcggcggagaaatgacggaaggaggggtggaaaagcctccggtttccggaaaatccggagcgcaccgggtcagatggtgccgttgagctttctgcctatccagaacagggtgagcaggaagagaagggccgcgagcgtgtacgggctgcaccagagcaggatacgcgtttccatgggcggcggcacgggcagctccttgatttccttgatgagctgctgtatttcctccgccttcaccatgcgtccgcgcgtgatggaggtcatttcctccatcagggcggtattgacgggctggccggttttttccagcgtctcgcccatggtgatgaccgggagcgtgacggatttgtccggttccgcggaggatgaagcggtcagcttccaggtgccggggcggttgattttgacggaggcggtgaaagaaccccaggtgtggtccatgttgtccatctgcacgcggctggtggtgccttccggggcggtgatgtccagaaagacttccccgttctggagaggcgcccccagtttgtcggagaccatggcgttgacggtcagcgtatcccccaggcgggggcgttccgggttgggaatcaggcggattctttccccggcggccatattgcgctggtaactcatccagcgggccacctggctccagaagcggtagtggtatttgtcctccacgccgcgccgccagcgccaggcggagtccgtccccatgaagaggactttcccgttgccgtaggactgggtgacgatgaggggaatgcggccgtaggcgtttttgtccgccgcatgcacggccaggacggtggttcctgccttgggccgttccaccggggcgtaccagttgaagcccggcaggttgcgccacacttcctcgttttcaccctccgtatccgccagcatggtaaggagggagccgcgcccctccggcgtcaggatgaggggggagggggctggctgggtggttccctccggcttggcggtgagaaacgtgacgggcatcaggtctcccagctcggatttcaggagttccatctgcttgccctggtagccgggcaggaagacgatgccgctggcctggtttttcaccatgcccttgagaagggcggcctgttcctccgtcagccccttggggcccagccccacgtctccgatgaagatgacgtcatactgggccaggtcttccatcctgtccgggaatttgaccaggtagccggggccttcccccatttcctccagccccgggtgaaagagcagggtatgcacgtccacgcccgggtcgcggtacagggcgttccggatgaagcggtactcccagcgcggcagcgtgtcgatcaccagcaccttgatggattccctcctgccggcgatgctgaaggaggaggcgttgttgttgtgcatccgttcctggggctggacggggagcttgagctccagcgtttccgccccttccttttctatcttccacaggacggcgtcggacacttccccctgggccggaatggtgaccgtgcgggtgacggtttttccggtgtccctggaggccagggtgagcgtggtgcgcgtttccttgcccagcgtgcttttaatggtgaaggggatctgcaccgtctccccgatgatgccgtaggtgggggctttcacgtcctggagggccaggtcgggcagggggtacggactgccggcgggaatgatgaagaggggaatgcccctggtgcgcatgcgctgggcctgcgtcagcacggaggaggaggcgttgtggccgccgtccgtgaacatgatgaccgcccgcaggttgtccgaggattgcatggcgtcttccagcggcttggccaggtccgtgcaggccatggcgtaatccggggaatccggcggagggggggagccgaaggcggcggattccaccacgtgcgtgtctttcagggattccgtgctgttgcccttgatcagctcctgcgcgtaggccgtgcgggtaacgacgtgctggggggtgatttccacgtcctgcgtttccatggagccggagcggtcctccaggatggagaccttgggcttctcctgcggggctgaggtgacgacccattccggctggaagagcaggaagcagatggcccccagaatcaccaggcgcaggagttccagcttgaacgtcagcggacggcggttgcgtttgcaggcggtgcggctcatccagacgccggccgccatgaccaggacggccaggaggacgcttaaagcggtaggttgaaggctcaggctcatgggcggatggtgggggagggacgtttggccgtgtgcctgggcaggcacaggaaagcttccagcagcaggcaggcgagggaaatgatgaggaagagtttccaggcctcctgcaccagggagggcgtttccgccgtgctctgcatggagctgatggaggcctccggcagaaggaggcggagcttttcatccgtaatctggtccggattgtcttccgaccaggggcggttcacggcataggtctgcgctcccaggcggtacacgcctgccgtgtccgccggagagccggaggggtggctgccctgggcgttgtccatgcgcacggggatgtctgtggcggattgcggcagggccgggtcattcacccggagggagatggaagtggagaagcgttccgccccgcggtccgccatgcgctggagcagggggagcagcaggtggccgtccgccaggttggaccaggaatatctgggcagagtccccaggaacagggcggaacccgttccggccctgacctgggccagggcgcaggtgccgtcatcccaggaggccagggtgcggtatttgcccagcaggggtttccggcgcacggcgcggagccggttggcgggaatggccgcctggtcggaaccgtcccggaggaagccgcgctggcggtcccatgtttccaggcggtagtactcctcgggcggggccgtttccatcgctccccaggagacgcccaggaacggatgccgcgtgccgtgggccgtatcgtccggcaggaagaggacgattcccccttcttcaataaaggccagtagcttttcttccatttccgcgcgcggcggcggtccgtaccaggcgaccatggactgggaggccagagcggcctgcgccgcccgcgtgttgccgggcatcgtggccttcctgttgggcaggccgggaggggcggacatcagggagagggttttccccacttctccggaagggccgcagatcaggatgttggcgaggggccggggggcgaaggtgaagaaggaaatgtcatccctggtgaagtcgtcatgaggcagggaaacgaagccgaagccggattccttcccctgcggcagcggaatttccttcctgatggcggtgctttccccggccagttgcagcgtggcggaggcggcggcattatccacggaaaggtgtaccggcacgtcctccggctggttggggttgaagccctggcgcagcacctccaggtccagcaccagcctgccgttgttcacctgggcctgcctgaccctgatgccgcggttgctttccggcctgtcgcggagggccatgatgcggatggaggggggaatggccagagcggccagccgctggcgcacgccgggccagaggggggaatccggcctccaggaggaggcctgcatgtctgaggcaatccagatttccgtctttccggaaccggactcctccagatacgggatggctttttgcagcagggccggaatgtctgcgccgccgtccgtggttttgctgacggtcaggtccgccagggcttccggggcgggaatctgggtgacggttccggtggcggaatcaagcagggacaggcggcagtggccaagctgcgcaaaggtggattccaccagcggcgggatggcgtcccgcagggagttggttttgtccggccgtgcgtccatggaggcggaacggtccagaaccagcaggacttcattcagtccggaactcccccagccgaagaagctgctgagcaggggccgcgcaaaggccgtcaccagcgccgccacggccaggacgcgcagcgccagaatcaggtagtgcagcagttttttcgtcccgcgggtttccctggcggcgcggagcaggaattccatggccgcccaatggacggagcggtgccgccacctgttgaccaggtggatgatgatgggaatggaggctgcaaagagggcccatagcagccagggagaggtgaaggacatgggaggataggggtagttggggattcaggcctggttgtcaggtagagggcgggtcgggcagcagctggcggaggatatgcagggtcatttctccggtttgcttgaaggatttctcacccagaatgcctatgttgtccttggacgtgtgccaccagttgccgtcctgaaaatcgtcgatgatgttcagcgtatccatgccgaggtccatgaaggggacgtggtcgtccagaatggcgtagccggagaccccccattcctccggtgaatagcccagttcacgaatggcgcgggaataaacccggtacatggactggggcgtcatgaccgggatgcgtatcttttttccctgccgcccgaccatgtccaggttgatcatccacttgggcagcggcttccgcatggcggcggcatagtgcttggagccgtacaggccgtcgtcactgtccatgtgttccgcaaagctctcttctccgtcaaaaaacaccagctccaattccccggcgcgcgcgggttccccggccaggatgcgggccgtttccagaatggccgctgcgccggaagccccgtcattggccccggtgaagccggcaatgccctgcttggtgtcgatatggcaggtcagcagtccccggaccggagcctgaaaatccggcgcgttgccaaagcgggcccgcaggttgacgaactggatggggcccttggacgtttcctgttcaaaggattgctcctggcaggtccagccgtgtttggccagttccttcttcaggtagtccagttgctggcggtagcctggagtgccggagccccggtcccccatctccgtcatccgggcagcgtggaacatggcgtttcctccgttgaagtgggttgtttcctggagccgggcaggaatggtttccgcacccggaaggggcgtttccacgggatttccgcactgcatcagcagggccgtgagcaggatgagtccgatgcggggcgtcatgggaaaaagacggagtggaaggtttacttggaagcggaccattcatcctggcccagaagttcaagaatgcggacgaattcggccttgctggaaaaggtgatctcaatggagccccggcttccctgtccggaaatatttaccggcgtgccgaattgtttggcgagcacgctggaaatcttcttgtactgcggggaggagggctttctggcgggagccgccggttctggaggattgagaagcttctggatggctttctccgtctggcgcacggtgtagcccttgttgacgatgtcgcgcccgagctggatttgctggtcctggttcttgagggacaggagcaccttggcatgccccacgctgatgaaggcgttgcccagcatgtcctggaccgcctggggaagatccagaagccgcatgctgttggctacggcggcgcgggatttgcctacccgcttggcgatgtccccctgcttcatgcggaattccgttttcaggcgcatgtagccggaggcctcttccagcgggctgaggttttcacgctggaggttttcaatcagcgccagctccagcacgtccttgtcggaagccttccggatgatggcgggcacggtggacaggcccaggatgccggaagcgcgccagcgcctttccccggcaatgagctcatacttgccgctttccgttttccggacgatcagcggctggatgatgccgtgctccttgatggagtccaccagctccgccagttgttccggggtaaagatggcgcgcggctggagggagctgggaataatggaggcatgggataattgatgcacaacgtctcccgcctggggagccgccaaggattcacgagacagattttgattgataagggcgtcaaagcctttccccagagccggttttgccatagcagggaagaaactagcatgaaccggttccgttttcaacagggtatttgttatccgcagcggaaattcccgcttgtgcggccggtttcatcctccatgttcccggacgtgtcaggcgtgttgcgccccaccccgcgggcaggtcaaagatggcggtgccttgaacggcccgctgccgccgcgctggtttccggcaggctgcggatatcctgtcccgtgcagggcagggggcgtttcaaggccatgaaccaacaaatgaacgagatgaacagcaatgaacaatcctgccatggcgcgggctttccctgcggaaccgctgcggcgcagcgcgcacctgaattccttgaactccttgcccccgcccgccgatgaagctcaatctgacggaagaacaaaagaaagccgctctggaagcgggaaagcagggcatgaaaaacgcctatgagaaaagcaagtaccggcccggattgacgtggtgggaacgcctcctgtgggtggttctggcgggagcggcctatgcggcgtcctccctcctttccggctgcgggcataccatagacgtgactgcggagcggacggagatatgcagggacggcgcctgcctggtgctggaaccggggcgcctgtcctattcccaggcccagccggagacggaggtacagcctgtgatccagagaatccggaaaggcaaatgattccgtgccgtccggtccgcaacctgccgggacaagcggttctgcatgagccgtcccggcgggaattgcggaagtgaatggcctgtggcgaaaggggaatggcatgaacgctttatcagccgccgccgcctattatctggctgcgggcaggagggaagaagagatggatgaggatgggcgctgccaggatgtctatgtccgtaccccggagcttgtcctgatggcgcgccgggtggattcctccgctcctttcggcaggattatcgatgtccgctgccggtttgagccggaacggtgcgatgcctggcatctccattttctggcgggagaggcgcgggaactgttgacttatgaacgggaaattctttccctgccatggattctgacccagcatggcaagcgcggggacgggcggctgatgaagttgtcttcttcccggttctgccgcctgctggcggcgtctgcggttgccggaccgctctcctgaccctgttgaagaaacggaagcatccatgcggaaaaccgcatggatgcttttgttgcctgctggaggtcgccctgatgaaagcgtgctaggcattcaaagacgccggccgctttccggttcgcggcatttctggtgaaggtcctgctaggccagggcggcggcgaactcgtaggcatttttacaacggttccgccagccattaccgaaggtgctgaactgcctgcatgaacaataaaacgactcgcgccgctcgtaaaggctgtcaaggagtttgcgttctccggattctgcaagaacggtttgcagcgtttgccgggtttgttttccgggaatgccgtccacggaaattccggcgccgtggtcgttcaaggctcgctgcaatatcttcccggtgttcttgctgccggaattgaaataatggtcccgcaggaagaactcaatgcccggatgggcgtcagaaccaatccaggaacggacggcggcggtattgtccagaatatattgaagacagccttcccaggcttcttcctgttttccggcgtcaagcaaggctttgaggcggttgaatacggcgggttcaatgccgtcgcagatgccgcagatttcccacttgccgcccttgtcagcggcagggaggcgggaaacgcgcagggaggccggcccggtgacgcggtcgtcttcaaagcggagaatggccgcagccatctttttttctgtagtattcataggttccaatagtggtggaggttcggcggacctccaatgaatgcgtcttcaaggggaaaaatggctttttgacctgccgttttccatcaatgaacggtccgccgcttgagctgcatgcacggctgccggggataaatgaggcgtctccggaacggtttgatgcgtccctgcatgggggtgccgttctttccccggcggcgctgggccctttattcctaggctattcatgaaccattgaaaacaaaaagcataacgcctgaaattcacaaaacccggtgagggatagtgattccttccatttccggagattggcggcattaaagacgccgtggaatcgtttccggatattccccggactctgggagccattcaggaaagtggcgctcctctccgaagcatggcacaggggttttcagagactgcttcggtgcacccggaatttattatgcgcaaaaaggatgattaagtcttgcgtcctgttgggaatggtgccactgtcaaaggactttacgttaggatacttcgccccttggcctccgtgccagggggcttttttatgaatgcggcccgtcgtgttccggatactgcgggcggtatgaactcctgactccgtttccggttcaggatgggcgtaaccggaaacggcatgccgcgcattcccgtttcaggacaaatccggagggaacggccttttccgttttgacgtgcggcttgacgtgggactgggttctccctggcaagaaaaagaaaacccctcaagcggtgaacttgaggggtttataatggagccgcttgtcagatttgaactgacgaccgtccgcttacaaggcgggtgctctaccactgagctaaagcggcgtggtgaatgaggtggcccatatctacagaagatggcccatggtggcaagccgaaaatggggtggcaggcatggcgcgcctcattttaaccgcttcaggagtcaaacagggagccctgttccagtgccggtccggcaggcggttcctccggtccgggagatgttccggcctgcggcgtctccgtatccggaacggacatgttttccgcctgttccgtggcagcggaaggggagggcgtttcttcctccgtttcctcgtctccggttttcgccgggggcatgatgcgggagacgcgctccaccggatgtttggtaatgatgttgccctggaccccgcggtttttaatcctcaggtccgcgaagtggaagggcctgaccaggttgcggagcttcagcacggccttcagatagacgttcacgctgatctgggagctgttttcctccgtttcatgcacggagaagtggaagatgcgcgttcccttcgcgccgcgggtgagcgggtattccttgtccctggtgaaaccgcctatgcggaagcgcttggcgtacacggggccgtcccttccgtcccggtagatcaggttgaacacggggtcatcatccttcttgatgacggaaatataaagggggtttttaccggcgaagaatttgtcctgaatccgcacgatcttgagcacgcccgcgctgtcgatgaccagcacgtcgtccagcgtggagcatttgcagacggggtttcccttcttgacgccgtacccggcgaagccttcttcgtcaatatacagcgtttcattggccacggccacctgggcgcggtccacggagccaaaggaggagatttccgttttcctgggataggctgcgccgtacttcttgcgcagggcttcaaaccagcggatggtgaatttggtgagctggctgaggttcttctgcgtctgttcaatgtccgcttcaagctgccggatgtgctggtccgccttgaacgcgtcaaacttggaaatgcgcttgattttaatttccgtcagccgcaccaggtcgtccctggtgatgggcgcgcgcagctgggcggcaaagggctgcaattcccggtcaatggtgccgagcacttcctcccacgtctcggaatcttcaatggagaggtaaatgcggttttcaatgaaaatcttttccaggcttgcctggtgccatgcctcgttcagttccttgaggcgtatttcctgttcctggcgcaggatttccctggtggagtccgtgttgtagcgcaggatgtcgctcacgcacatgaaccggggcttttcctccacgatgacgcaggcgttcggggagatgctgacctcgcaggcggagaaggcgaacagggctttcctggtctgctccgggtccgctccggccgggagatgcaccaggatgtccacgtgctgggccgtattgtcctcgatgcgggctattttgatcttccccttttccgcggcggagacgatggtatcaatcaggatttccgtggtgaccccgaacggaatttccgtgatgcggagaagcttcttcgattccgtgaggatgcgcgcccggatgcggacgcgccctgtgccgcgttccccgtcccggtagttggtggcgtccatcacgcctccggtcgggaagtccggcagaagctggaagggctggccgcgcaagtgcgcgatggaggcttcaatcagttcgttgaaattgtggggaagaattttgctggaaaggcctacggcaatgccttccgctccctgggcgaggagcagggggaatttgacgggaaggctgaccggctccttgttcctgccgtcataggaaagctgccattccgtgaccttggggctgaagacgacctcacgggcgaaggaggtgaagcgcgcttcaatgtagcgggaggccgccgcgggatccccggtcaggatgttgccccagttcccctgcgtgtcaatgagcagccctttctgtcccaggcccaccagcgcgtccgcaatggagcggtcgccgtgcgggtggaatttcatcgtgtcccccacgatgttcgccactttactatagcgcccgtcgtccagccggtccatggcgtgcaggatgcggcgctgcacgggcttgaatccgtcattgatcttgggtacggcccgttccaggatgacgtacgaggcgtaatccagaaagtagtcggcatacatgccttccacggactggctcgcgggagcaatgtgggcgggttgagtcacgggcgcaaatattaaaggaattgttccggaggggcaagtgcgatctccggaaagaaaataaccggccttccgttaaggaaagccggttaccggaaaaaggaatggctaaacgcaatcaggcctgtttggccgtaagtctgtttttgagttcctccgcttcggcgcgcagggtgtcgagcttggttgtctgggcttcaaggtcggcgatttcttccaggactgctgccaggcggcgcaggtccgcgggctgggccgcagcgagaggctgagctttgggagcggctgtatttttggtgccgggcttgcggccgcgcttggccttggtggccttcatccagcttgaaatggttaccgtgctgatgccgaagcgttcagcggcttccttctgggcgcctcttttgttctgagttttccgttcagcgatgaagtcaagaacggattgtttttcttcaggcgtatagcgcctcttgtttttggtgctgtcgttggagttcatgatattgacgagtggctatttgtttaatcaaaggtccgtagggtagcaagcaaaaagagcaagtattttgacataatttaaaagactgtttaaatatagggggcatattgttgacgttcagaggtaatatgcttattttattcatgatttttattatttaaaatttgaattgtttaacattccgtgcaagggcgcttgcgggatgtttaaacgctttttcattttctgcgccgcatgaagtctttttccctgaattccttgttgaatcaggagttccggagaatttcgcgtcccttcgtcagtccggattttgagattgcaggagccggagggatcgtgtaaaatcgccccaatcttccagccattttatcatcatgaccgaccagccagaaaccccgtcttctccagaggctcccaaattacgccgccgcctggtaacggcagcccctgcggcagcgcccaaagtaaagtttgcttcccccgccgcggaaggcgtggaagttgccaaaccgcgtttcctcactcctgaattgcaggccaagctggcccaggaacaggaggaagccgcgcgccgtgccgcagaacaggcggaggcggacaggattgcggcggaaaaggcggcagccgagcaggaggccgcccgcatcgctgcggaaaaagaggcggccagaatagccgccgaggaggaagccgccagaatcagggcggagcaggaggccgcggaagccgctcgcattgccgcggagaaggaagcggcccgtgtggcggcggaagaggaaagggcccgtcttgcggcggaacaggaggaaaaggaagccgcttcccaaccattgcccggtccggcggtggatgcccagattcaggatgcccttgccaaggtggcggaggcccagaaagccctggcggacgcgcaggccgctgccctggcgcaggccgccggcgtggctcccgctgccgttcaggcgcctgaaccggctgctccggcgtctgccgcggcttccacaggctccattcccaaattgaaagttttaaagacttccccggctcctgccccggcggaggaagcccctgccgccgccccggcggaaagcgccgtgccccggttgaaggtgctgaaatcccctgtggggaccgcgcccgttccttccgtggcgtctgccgcggcttcccagcccgtggctgccgcatccgtttctcccaccgccagcgttcccctcgcgggcacgggaggcatccagccgcctgccggcacggaaaccacccgggaaatggtcgcctccgtggacaaatccaaatccctgctgaggggcgtcatttacggggtatgcgccctggtgcttgccgctgccggggtaggaatttatgcttggcataccaacagcaagaaagaccaggtggaaggggaaaacgcgcgcctgaatgcactggtggtggaaggcggcaaactgggccgcagccgcctgtttgattccaaaaatctcagccgcgttccggacgtgaaggtggtgcccaatgcggaggacgccgccctgctcctagccaatgtgaggggagccaagggaaaccgggaaaactggcccggcgccgcccacctggtttccatcatggcccagatggatgacaacatcgcacgccaggtggtggaagacatgaagaaaaacgtcggcaggtacagcaaggagaaatactccatgatggtgacgctgctggccaaatcttccagccccgccatgcgcgacatgctgaaagacctgtacgcctccatcagtgatagcaaaaacaagaaaattcaggacaagcaggccgtggtgctcaagtacatgcgctttgccatgaagctggacgacctggacgacgtcatgaagattctccagcagaaggatgcttcccaggacctggtttcctccgccttccgcacggcccgctacctgattgacgaagcccccccggccaagcgcatggcgctctcttccaagctgctccagtaccagaagaacatgccggaggaaaacgtcaaggtcctctacaagctgctggcccgcaccggcgatcccaaggtgctggacatgatggaaaagagctacaaggaagaccccaagaaggcgctcgccatcatcaccgcctggggggactggaacacggatgacgccgttccgtacctgttcaaggcgtggaaggatgaatccctgcatgaacgcgtgcgttcccaggcccatgattccattctccgcgtgctctccgtggaccgtgaccgggatgacaacgccacgctcaagctgttcgagcccctgatagcggacgccaagacgagcgaacgccgccagttcctggtttccgccttcaagaggctcagcaaccgcccctatgtgatccgcctgctgggccgcatcaagcagacggcggaagaccacaggaatgtggtggaacccaagttccaggccgcagaggaagccctgttcaaggcggaggacaaattcaaggccaacccgaacgatgccgccgccaaggctgattatgaagccaaggaaaaaatctataatgagctggccagtcagaaaaccggggaagacaaggtaattacggcggtggacaaggccctggaaaaggtcaggaagacgcctgtgcccaccaggaaggccgcttcctccgatgacagggaggacgacgaattttccgtcatcaagacgatttaaacggcttcattagacgtatctggaaccggagggaggacatccctccggtttttgtatgtaagggaattcccttcgctgccggaaacgaggattccttgttcccggtacacgatgggctcctccctgggaacaagtggctcctgctccttgccagcggtggcaaaaaacggaagaaggaaagctctcttccgttgactgtggagccagaccgaatccgaaggccggatggccttcgctcccaggggggggggcagtagcgttgtcgggaagggacggactttccaggggcgtatggcatttccccgccattccggcctgccggaaatatttcctgccgccgttttttccgcatccggctcttacaggaacagtcctgtctggtacaccagcgtagctgtcagaaaccccagcagggtcaatccaccgaattgcgccagagcaaaccaccaggtgccagcttcccgtttggcgacggtgacggtgccgatgcaggggagggcgatcaggcagaacatcatgatgctgatgccctggaggggggtgtagctggctttaaggcgggcgttcagggtctgctgggctgccgggccggagtccccgtcctgcaccgcatagagaatgcccatctgggtgacgaagatttccttggccgcaaaagcgcccagaagagcggaattgatcttccagtcaaatccggccacttgcgtgacgggttccatccagtggcctatttgtccggcgtaggaatgttccatggccgctgccgcattcggcgcggttccttcctccggcctggggtaggtgttcaggaaccacaggatgatggaggcccccagaatgaaggttcccgccttccggacgtacatgaaggcccgcgaccacatcagggcgcccaccttccgcagggaggggaggcgcaggcgcttcatgtggtggagggagtccctctgggcggtcttgaagagcgtgtttttcaggagccgggcgcagcacagggccagaaggacgccgctggcgtaaatcccgaacaatacggtggcctgcaggcgggagggaaacagggcggagacgaacatcatgtaaatcggcaggcgacccgcgcagctcatcatgggcaggacggcgatggtgaccaggcggtcgttgcgcgcttcaatcctccgggtggacaggatggcgggaaccgagcagccgaagcccagcaggaggggggcaaagctgctgccgttcagccccatgattttcatgatgcggctcatgaggcgggagacccgcatcatgtatccgctgttttccagcagggtgatggctccgaagagcagcaccacgttgggaagaaaggccagcacgccgcctacgccgcccaccacgccttcccccagcagggattgcaggcggggccacggttccagcatgcggcaggcccagatgctgaacatctgcgtgcctgtctggatgagcctgaccagagggtcgccgatggcgaagctcaggaagaaaatgatgtaaacgatgcacaggaagataagggaaccccatatcctgtgcatcaggacggcgtccagcctggttctccacctgttgtcctgcgcctctgcctcccgttccataaattaccggggagtaacttagaacctgcgaatttgacaggcaagcttaaaatcccggatttgcgggaaggcggccgggccgtttggccggctttgagccggtgcctgttccggattgtttcccagggaactgcggaagcccggcttctgctagcggcgcatggccgcaagcccctgaatgaacagaatggccgccgtgcagccgaagaccatggagggcaggcgctggagcatatatagcgggtccgtggagtcgttcccgtaagaggggaagatgaaagccatgaccagtgcaatcagggccaggccccatgccagccaggacacggcggggacggcagtgccggagccagcggcagtgagccgggagcggcttgcttccctggggtcgcgcccatccgcgtcccgtccggaagaagccggctgctttttcttgacggggggcagggatgccggtgtttttacggcgttttccggtttctgtccggagggggaagagggggcttccccaaagggaagccccgttttaacgtgaatcaggacgccgcacgccgtgcagtgcatgccggctttttcatccagcccggccgggtaggtatacccgtgcccgcacagggagcatgtggcggattctctcatgattcaggctgaatgggtgttagtcgtccagcggaaggaggtccgcccggtcggccttggtttccggcctttggcggatttcctggagcttggctttcatctgctcgcagatgtccggatgctgggctgctacgttgttgagttccttcgggtccttttccaggtcgaacaggctgccgccttccggggacttggtcattttcgctcccagtccgttgatcccgtcgcggatggctacgccggcgggaatgaacttccacttgccgtggcggatggccagagccttgccggtgctgttgatgacatggtagtcgcgtcccttggcggatttgcccaggagggcggggatcacgttttcagagtcgcggaaggaattggccttgccgggttccaggagctgttccagggaggcggccaggtccatttggttgaacagggccttgctcgtcgctccgggtttgactactccgggccatttgacgatgaacggaatgcgggagccaccttccagaatgctgtatttgccggcgcggaaggggcctgccggggagtgggtggcgttgtcccggacggcaaaatccttgtagccgtcgtccagcacggggccgttgtcgctggagaagatcaccagggtgtccttttccagtccggctttttttagggcttccgtgatgcggcggacgcagtcgtccagttccacggtcacgtctccccgcacgccatgctggctcttgcccacaaagcgtttttccggacagcgcggcacgtggatgtcatgcgtggcgaacatcaggaagaacggttccttggccttggcgctcttctggatgtattcaatggccttgttcgtgatcacatccgcgttttcctcatccttccacagggcgctcttgccgcccttcatgaagccgatgcggccgatgccgttgatgatggcctggttgtgcccgtggctccacatgagtttgagctggtccttgttgtccttcccgttcggaagaccggggaagttgtgctggtaggacacttcaatggggtcgttcgggtccaggttgcggacgttgccgttttccagaatcacgcagggaacgcggtcgcccgtggcggcgaagatgaagctttcatcaaagccgatttcgttagggctgggggcgatgtgcttgttccagtcaatcttctttcccttttcccccaggcccaggtgccacttgcccaccatgtaggttttatagccgtgggattggagcatcttgggcagcgtgggcttcttggtgtcaataatcagggcggcgtcccccggcagaatgcccgtgccttccttgcgccagggatattccccggtgaacagggcatagcgggagggagtgcagacggaggtggtggaataggcgtccgtaaagcggacgccctgcttggcaagcttgtcaatggaaggggtgggaatccccttggctccataacagcctacgtctccatagccgaggtcgtcagcgtaaatcatgacgatggctttgggcggcttgacctggggcgtggtggcggccgggcaggccgctgccgccgccagggcaagcatcaggtgtaatgcgggtttgttcatgttgtcaggtgtgtgtggtgttgcggttgatcaaaagatggttggaaaaatgccgggattctgccgggggaagggccgcgcggtcttggctggcgcttttaatgaggctcctccggcggcggcaggggctccgtcatggggcgcatgctggcattctgccagatgtaacgcttgtagagaaccttgatggcggccgtcagcgggacggccagcagcgcgccgatcaggccgcccaggataagcgtccagatcagcacggagaacatgaccgtgagcggatgaagctccacggaatcccccacgattttcggctggatgacccatccgtcaaactggttgacggccaggaagatgccggaaacgatcagcacgtgctggaagtctccccacgtaaaccaggccagcaggaccgcgggaatgaaggcggtgatgatgcccaggtagggcacgatgcccagcacgcagaccgccgcgccgatggtgacggcgtacggcaggccgagcagtttcaggcagatggcgatcaggatgccttcaatgatgctcaccagcatctggccgcggaagaaggaaatcaggtatccgttgatttcctccatggtgtccaccacgtcctttctgaatttggaggccttcagcggcaggatgctgggccatttctccctgatcttatccgcttccagcagaaaataaaaggcgaaaatgggcgtgatcaggatgctcaccatgatgcctatagtgctgtacagggcccttccgccggaagtgagccagctcatcagcttgtcctggtaaaaggaggaattgatggtcatgtacgcccccagtttttcccgggcggtccgggcgtttctcaggtcgtggacctccgcgtccgtataatggccggtattcagttcccgcaggctggtgctgtaaacgctgtcaatggtgcgggagatgaagggaatttcaatggtggagtcaatcagctcggaggtcttgtcccagagctccatccggttgtcaatcagctcatccgtctgccggatcaggggagggaggatagtggcgccgaagcccaccaggacggccagagccgcgaacatgaccgtgaccacggcccaggggcgggagaatctgaagtgcaccagccaggagacgatgggttccagcaggtaggccaccacggcggcaatcaggatgggcaggagcactggttccagaaagcccaggagtttcaccacttcaaagatgacgaaggccgcgatgcacagcatcaccaggatggcgacgcccgtcagggcgtaccagcaggtctttttctggaagggtgagggaatgcggcagtcgccggcggcttcctgtgaatcctgttgctgtgcgtcgttcatgccggtggtagagagatggctggataggggctggctcaggccgcgggggtcttgtccgttttcccgtcaggcgcgggggcggcctcctccggagtttccgtcgcggcgggcgcgggctgctggtctcccgcggcatcctggggctgttccttttcctcctgctgcttgacgtggttttcaaactcctgctccgtaatggcctggggcgtggggtaataatccccggcagggggcgcggccggaacttcccagtgaatgcgcaccagtctgttcctgcgctggaccacaacgcttgcctgtgccccccgctgggtggtgacatattctacgaggtccggatacggattctttctcccattgatggaaacgagcacgtcccccgttctgaggccggcgtcccacgcgggcgaccattcggccacgtaagccttcatggggccgttcccgttgcggtcctggatgaaggtgccccccatcaggttgaaggaggagggcgcgggcatccggtggctggtggagctgaaataaagggcgttccccgggccgtccagccagaactggcgcgcggccagcgcgccgtagcccaggatgatgtcgatgtcgtcgggaatgcccatcacttccggattggcgaagctttcacagagcaggatgttcttcaattccagggggccgagctggaaggagctcacgtgcatgcattcatgggcgtaaaagccgcccgcggcggggctgtagccggaataaacgctgacgaacgcgtccgggtaggcctgcttgatggcgttccagcgtttcttggagatgtagacggcatggggcgcgcccgtatccagaatgatgcgccggccgtgcttgtccgcaatctgcgggtagtcggaaccgggaatcagggaaagcttgtgccagctccgtattttggagggcagtttgttgaaaaagcggtgggagcgtttgggatagttgatgttccatacgtacttccggatgcactcccagcccagcagtccgtcatacggcgcctggtccaccatcaccacgtcctgcttccgggaaatgggttctccgtcatccttcagggaaacgggcacattggccgtgcgcatggcgcccctgccgcgcaggcgtgcgccgatggattccaccgcgggggagaaaagcagggacgtctgaaccgctcccgtgtccacccccatcatcaattgcgttccggagctccacgccagggccacgggggtgccgtccagcgggttggccgcgtcaatgggcggagaactgctgtcctggataggccggtgcgatacgcaggaaacgcacagcatggttgccagaagcatgatggaggaacgaaacataaagcattccattcataacaaacggaccagaggctggcaaggtttccttcctgcttatggagctttttggcggcatcagtccgtaaaacttgccacgatatatgtatctgataaggtagaagcatgatattcaggactttggcatatgtgtttcttctgggctccgtgtcatgggcggatattccgcctgctccgtctcccgatgtttccgctcctccggagctgcgcctgttccgggcatgcatggagaaaagcggcggcagtgtcatgatttcccctttttccctgtatgaagttctccgttacatgcttccgggagcggcgggggaaacggagaagcagatggcggccgtattgcccggagacggaaaaatcaggagggactggacttttctgtctggtgatttttcgcgctcgctgcgctgttattccgccaaccgcatttttgcagaccggtccgtggagttgaaagacgcctataaaaaggccgtagggccggatgccgtggctcaggcgcccttccgggaaaacatggcggaagccgtgcggcaggtgaacgcctgggcggcaacgaatacgggaaaccgcatcaggaatcttctgaatccgcagcggatgagtgaccggacggtgcttgtactggtgaacgccatgtatttgagggcgttctgggacagtaaatttgaagggcgggacaccgcgctgcgaacctttgtccgggaggacggcgctgcctgccaggtgcccatgatgaagcagcaggtattcacggaggggaggtcatggccccggcagggaggaatgtattatgaaaaggatggcgtgcggggggcaagcctgttctttacgggagggaagggcgcgcccgttttcatggccgttcttcctccggaggggaggaagatgaagcaattcattgacgggatgaccgcagaggactggaacggcatcctgtcctccctgtccgcccgggatgccgcggaagaaacgcggaagcccggcggaaagcccctggagcaatattccagataccatctgcggctgccgcgtttctcccagtcttcccccacgctttccctgaaaaaggccctggaggcgctgggaatggaggacgcgtttaccggccgcgccgatttttcacggatggggagctgcgcgctggagccgttgaaaatccatggcgtgtaccagaaatgcgcggtcagagtgcgggaggaagggctggatgcgtccgcttccactgccggagagatggatccatttgccggcgctcctccccgcggcagggggccggagatcgaattcaaccgtcctttcctgtggctcatttacagcccggaggaccgggccgtgctgttcatgggaacttatgaagggccggaatgcgggaaaaaggaaggaaagccgtgaagtttgcgcgctcccaaaaatcttgattttcacaggggcccgtatagggtagaggtgagccgttatgaccacccctacgtttgaagatgccgtgagccgcattgtgcggaaggatccccgttttgcggaacgggcgtattcctttctgaaagatgcgctggatttcaccatgcagcgcattgaagagcaggaaaacggctcccagcggcatgtcagcgggcaggaattgctggaaggcttccgggattacgccctcgcccagttcggccccatggcctccaccgtattaaaggaatgggggctgagaaacgggaaaaatgtgggagagatggttttcctgctgattgaggaggatgtgttttccaagcagccggaggattccctggacgatttcaaggggttcatgagtttccgcaaggcttttgaagagccttacgaatcccaggagcagcccagttgaccccccgtaccgccatgagcaaggaacccgatgtacgctggcccgctgaatgggaaccgcaggacgccgtctggctctcctggccccaccgcagggatttgtggcagggcggcctggatgaattgcagcagacctacgggcgcgtagccgccgccattgccccgcatgcccgcgtgtgcgtgaatgccgcggaaccccttcatccgggcatcaggcaggcgatgcaggccgccggggtgcgggaggaccagtaccgcctgttcaatcatccggccaacgatgtctggtgccgggaccatggccccgtcttcgtgcagggcgtggaggacggctccctgatgctggcggactggcaatttaacgcctggggcggcaaatttgctccgtgggacctggacaacggcattccctctctgatcggcgcttccctggggcttcccgtgcgcagctcctccatggttctggaagggggcgcgattgaaggcaacggggacggtctgctggtgacgacggaatccgtgctgctgaatcccaaccgcaacccggaatggagccgcgccatgattgaggaggaattgcggcgcatgctgggcgccaggtccattttctggctcggttccggcattgagggggatgatacggacgggcacattgacgacatggtgcgctttgtgtgccgggatgccgtggtctccatcgtggagacggacccatcctccccccattaccgcgccctggcggaaaataatgaacgcctgcaggatttgaggggcgtggacggttccggcgtggaggtgattcccctcccgatgccggaccccctccatgcggaggactggcggctggaccagctcccggccagttacgccaatttcctcatcgtgaatgaagccgtcatcgttcccgtgttcaaccagccccggaatgacgaccgcgccctgggcattctgcgggaatgcttcagcggaaaacaggtagtcggcgtggacgcccgcaagctggtgctggaaggcggagccatccactgcatcacgcagcagcagcctgggccgaggaaggaggccccatgaacggaggggaaggcgtaacggtggatgtgattctgccgatggagaaggccggcgacgaccgcgcgcgccgcgccgccgtggcggaaaagctgggcatttccccctcccgcatcagggaattgcggctggtgaaggaatccattgactcccggcagaaaaacattttgttccagcttcgtctgctggcgggggtggacggcccgctgcctccggaagaacctctttcccgggactatcctcccgtcaggcccggcgccccggtggcgctgattgtgggattcggacctgccggaatgttcgccgcgctccgctgcctggagctggggatgaagcccgtagttctggaacgggggaaggacgtctcctcccgccggtttgacctggcccccatcctgcggcagggcaccgtgatggaggattccaattactgctttggggaaggcggcgcgggaacgttctcggacggcaagctgtttacgcgcgcgaccaagcgcggccccgtgcgggaggtttatgaaattttcgtggcccacggcgcgccgcgggaaatcctgacggccgcccatccgcacatcggctccaacctgctgcccaacgtcgtgaaagctatccgggaatccatcctgagcgcgggcggggaaatccatttcaacgcgcgggtggagcatttgctccgttccgcggacggccgccgcatacgcggcgcggtctgtgcggatggccgggaatttgcggcggacgccgttctgctggctaccgggcacagcgcgcgggacgtgtaccgcatgatgctggcggaggggctggccctggaacagaagccctttgccgtgggcgtgcgcattgaacatccccaggcgttcgtggatgcccgccagtaccatctgcgcccggaccggaaacgcccggaacagcttccggcggcgcgctattccgtgacgaccaccattcgggaccgcggcgtccactccttctgcatgtgccccggaggcttcattgttcccgccgctacggaaaatgacgaggtggtggtcaacggcatgtccctggcccggcgggattccccgtttgccaacgccggctttgtggtcagcgtgcatccggaagatacggaatccttccgcagggagcacggcgtgctggcgggcgtggcgtaccagaaggcgctggagaccgcttccagccgcgccggcggaggcatgcagaaggccccagcccagaaagtggaggatttcctgaacgggcgcgtttcctcctccctgcttcccaccagctaccaccccggcattacatcccaccccctgcatgaactgcttccgggggaaatcgtctggcgcatgcgggaagggctgcggcagtttgaccataaatggcgcggttttgccggggcctccgcccagctcatcggctgcgagacgcgcaccagttcccccgtgcgcattccgcgggaccccgccacgctggagcatcccgggctggaagggttgtatccctgcggggaaggggccgggtatgccggcggcattgtttccgccgccctggacggccgccgctgcgcggaggccatggcgcggcagatgtcccgttgagggatgcggcgctccgtgaatcccttttcaagctttgccgtgcaaattccggcgtccccgccgttggccttgtaaaaacagcctttcgttccggaaatgatcggggcgtgcaagacggtagggaagcggctggaggaacggtattgccggaatgcatgtttgtggtatggtgtcttcatgggtaagatggttcgttttctgatcgttttaagtttatcgggaatggcggccgcccaggatattgctcctcccgccgtgccggacttgaaccgggatacggaggaaggaagggtgcgggaaaggaatcgtaaagaaattcggagctttcttgcccagttgtgccttgtccggaaccttccttcctttgaagtaataatcagaggcggcaacggactggctacggaattttatcaggtaatcctggaggaattcccggaaaatgccctgaaacgctgtcctgcggattttcaggaactggtcgttgtaaaaaagagcaagatacaggaattcctggacgggcttgaaaagaatattgtctggccttacgtggcggatgaagaagtggccgccttgctgttcaagtacggcttgaaggatgaagaggaacggattgcacgctgggtaacttccaggctgggtttcaggaaaagtgacacccccgcgtttaaagcccggcgcatccgtgaactgaaagaggagatggaggccgggaaagtcgtggttcccgaaaatattggcgaggctgaggaaatggaggacggggaggtgatggaagatgtttgagaagaaagccgttatcttccgttttacctcctgcccggtggcggaatctgcccctggtggagcgaacgtgcggaaagccgtggaagggatggattgctttccgcggctcccattccgcaacgtggaggttttaagttttcccggtgaagacgtcccggaaacgtaaaatattaaaggaacaagggattaccgcagatttcgaacgatcggaaagccccgctgtccaaaagtgaaccatgagaatgcccctgaactttttattgctgtgccccgtgctgtttgcgctgtccggtgccgcccaggatgtcggggcgcccggaatgccgaatgtggatttggaaacgccttccgggcagaagctggcggcggagaaggcgactatccgcaaattcttcgtgctgctttatttagccgttctcctgccggtcgtggaaaaccagggcgaggtattcaaggaaaaggacctttatcccctgatactggcggcttttcctgaacaggaattgaaggaatgcccgcaaaagctccaaaagctgatgaatgccagggttcaggctctgaaagaggcggcggacggaaaaagggatttgcagtccgagccgtttaatccggaagacccggaggttctggcctttctggcggaatacggcatggaggacatgtgccgccaggccttgaactggatggagcgggaagtcaacgcccgcggcaacatggaccaggactcgtttgcccaagcgttcaagcaatttcgcgatcatgtccgttcagggcgcctcgtcatgccggagacggtggaggaataagtccggtagttgttccgctccggcgtttttccggaagaaagggcaagcctgttgcggcggatgcccggaatccacggcatccggcgtatgggcggctgtgcgggaaggtccatgaatgggaaaagaagcggccccggcacggaatggcggaaaacttattgcccgcggacggtcccgtggtatgctgtgaatatggctggcatgagtcgctttttattgattgttttattattatgcggggcgttccctcttttctcccgtgctcaggatattgcttcaccgggaatgcctgtcgttgatttggattccgagaccgggaaaaaaattcaggaggagcgtgccgccatatgcggttttatggttgtactggttttgaatcagatgattttaatgctggaagaggatcctgcggagaaaatggatctgcaaaagagaataaaacatttttgggagttcattcccatgaacgcgcttgcccggtgtccggaagatttcagatgcgcagtacggcaatggaaggatacgtgtgagaaaaagatggaggagtctggagccgttcccggagacttggagatgggtgcgtgggaaggcgtacgcctgctgatggaaaaatacatggtgcaggagacgatacagccggtgatgggttggatgatgaagaaggcgggtatttctgccctggagatggaggatggcgccggcaaaaaggaaatgctcaaacgtcttaaaggaatcaaggaaaagctggaatccggagaagtggttattcctgcggaaatcatgcagaagcaggagggataggagctgggcggcagcatgggacggagaggaggaagagcagtttttaccgggcagcccccctcgttgccttcagggcgtttgctgtggttgctgcggaccttcctgtctggttttccgcagtagcggacagggagaataatgttgaccgcatgtgaagggctcctgtaacgtggtttcatgttaagtctgttccggcgggtggtggtttctgcattcctgacggcgttccccgccatgtcccaggatgtggcggcgccttccatggcgaacgtggatttggagacggaggaagggaaggccctggaacggtatcagcaagccattgaccgggtggaaatgctgggatgcgttctgggaacgatgataaggctggagatgaaaggccgggagacacgggaaatcgtggccgtcatgattgttcgcatgaactctgcgccgcctccccggatgctggagttgtgcccgcctgattaccggaaaacctttgaggcgtgcagggaagaatccgccagactgctggacaggatgaagacggaaaaaatggatgatgaacaattcgacaaggtttttaaggaatattgcaaccgatgcaatgaaatgaatgctcccatgatggaaaaataccgtttgagggaacgcagttctcttttttttcggatgctggaaagcaaggtgataggattgaacagggaggagcgcatgaaggcgcttcaacgaatgaaggacgacctgattgccggaaagctgaaaattccaggggaaaatgaaggaatggaagaagaaaccggattgataagatgatgctgaatgtagttttctgtgcagttctggcatgggcatgctggctgggaatggtgcgggggcaggatgttgcttttacgcaggaaccgtccgtgcgggaggcgcagagtgcggaggaaaaactgttcagggaccgggacgccattatccggctcatgatgtggagcatgctgtatctggagaaaagggctccgctgctggaccggatgccgatggagggcgtgcaccgcgcttttttggaatcgtacatagccgttcccgtcagactggtggaggaatgccccccggattaccgcaaggtgttttggctggtggatgccatgagcaaggcctttcttcagcgtatggaaaaagagaagctggcgggaaaggaattgatccgggagtacggcgtttatgttaaggcatgcaatgaattgctgcttcccgtcgtttcccggtatccgctttccgaaaggtttcagcaggtggaccgggagctcagaaggcagatgaaagcggccacagaccgggaagcgctcatcacggccctgatggagcagatggaggatgtggaacgcagtcttcctcctccggaaaaagaaggggctgtctctccggagaaaaagtgtggggagaaggtggaataaggatggactttatccccggcagatgctcttatcaactaatgatcaagctgattttagccgcaggcttggcgggctgctgcctgggaatggcgcaggggcaggatgtggcgtcaccctccatgccgaatgtggacgggtatcggcagacgccggaatttgcccgggaacgtgccgccgttgccaggtacatgtttttctggaccttgtgcgggcggattgccatcctggaatctgatattaagggaaatgttaatgcggggctgctttgcaagcggctgctgaatctgcttcctgaaaatatttcagccgggtgtccggagatgttccggaaagaatggatggagcatgtggaaaaaataaaagccgcgttgaatgaaaatcccgaatggatggagacgccgcaagggaaaaaggaatgtgctgcgatagaggctgtgatgaaacgcctggatgagcggtatggaatagaacgagcgatttatttgtccaatgaatggcttgataagcggttggagaccgggaaaaggaatgatgcccctgaaatattcctgaaggatttgctccggttgaagaaggactttgagtccgggaaactggctgttcctgtggagtttatatcccaagagaggaaggaaggatgagaaggctgggcttgttgctgtttccggtgcgggaaagaaaaaaggttttcaccgctgaaaaggcgatgaaattattcaaatggttttccctggcgggtatggcatggggatgcggttgtggcgtattgagcggacaggacgttgtggaaccgctcatgccgaatgtggatttggaagtgcagcagttcaggaaagcccgcgcggctatcctcaagtaccgtgtcatgcttgaattgtgctgtgaaattatttccctggaacggggaactccgtccggtgacaggagtaaaagcatgtttgacctcatgccggaacggtttgaggcggaatgtccgcctgatttccgggagtcgtatattgacgccctgaagatggtggatgaatactggaagggagatttttcccggaaagacatatccgttgtgcagaatctcatggccagtctggacgaggccagggaacggtttgaccatcaatatgatttgggccgctccatgaatgcgttgattgactggctggaccgtgggacgatgaagagggagggggaaagcgcccctgaccttttgaagcgcctttaccagtggaaaaaggaccttgagtcaggcaaggcggttattccggaggatgcgggagacccttccggaagctccgggcagtggagacgcggaacaggggaagaggcggtttcacaggcagaccatgaaagagatgggtgaaatgggggaaaaggcgtgtgcccggtgaggccgttccggagtttttgcgcctccgtccgggcatccttcacgcccgcggcccccgccgttttttttgaaggttaagtcttgccagggcagggggcttggggccataatctgcaagtttcacaaccgcacacacagccatgaaagtcatcgtcatctacggcagcccgaatgataagccctttatggaacccgcccgcgagtattttgcgcaggagaatgttccgtatgaagaaaccgtcctgtccgcccaccgcgacctcccggagctggtcaagttcctgggtgagctggaagccagcggggaaaaggccgtcattctggctgtggccgggctgtccgccgcccttcccggcgtggtggtgatgagctgctcccttccggtcatcggcgtgcccgttcccggaggccccctgaacggcattgacgccctgctggcgatcgcccagtgcccgggcggagtgccctgcaccacggtgggcctgcacaagaagacccccgtcaacgccgccatggccgcccaccgcatcctgaagctggccggcctgtaacgttcactcctttcccatcagatgactcctcctccgtcacaggaaatcgtgttggacggcccggggatttcccgtgcgctggagcgcatggcccacggcatcgtggcccgctttcccggggaaccgctcgccatcgtcggcctgctcagccagggggacgtcatcgcccggaggctggtggacaaggtgaaggagctgggcgtggaagcccagtacggcgccattgacatttccctgtaccgggatgacattttcaagctggaggcccgcccctccctccgttcttccaacctgccgttttccacggatgacatgagggtggtgctggtggacgacgtcctctacacgggccgcaccgtgcgcgcggccctgaacgccctcttcgactacggccgcccggcccgcattgaactggcgtgcctgattgaccgcggagggcgggaagtgcccatccagccggattacacgggccatgtgctggaccacgccggagccaaggtcatcgtgagcatgaaggaggccgacggcgaggaccgcgtaatcatctcctcccactagacacttttcaatccattacccgttttccatgaatccccgcaaggaccttctcaacatctcctcgttgaccgacgaggaaattcatacgctgctggattcggccggtccgatgaaggagctcttcaccaaaagcgtcaaaaaggtgcctgccctgaaagggaagtccgttttgacgcttttttatgagcccagcacccgcacccgctcctcctttgaggtggcggcggaacgcctgtccgcggacgtgaccaacttcacggtgtccacctcttccgtggtgaagggggaatccgtgcaggacacgatcgccacgctccaggccatgaaggtggattacgtgatcgtgcgccattacaacagcggcctgccgaatgtgattgcgcgccatacctgcgccagcgtgatcaacgccggggacggggcccatgcccatccctcccaggcgctgctggactccttcaccatccgggaggtgtttccggaggtaaggggcaagcgcgtgctcatcgtgggggacatcctgcattcccgcgtggcccgctccacttccctgctgatgaagaggctggggatggaagtggcctacctggggccgggctccctggtgccgcgcacggagcactccggcatcccgcgcttttccgatttcaatgaggcgttcgcctggaagccggacgtgatttacctgctgcgcgtgcagaaggagcggcaggacgcccccttcttccccagcgcccgggaatacaacaagatttacggcgtcacggaagaacgcctgaagcgcatttcagatgaaggcctgtatatcatgcaccccggcccggtcaaccgcggcgtggaaatctgcgacctggcgatggattatgagcgctgcctgatcaaccggcaggtggaaaacggcatcgcctgccgcatgtccatcctttaccatctcaccccgcaaacccagcactgattgctcatgaaaacttccgtacttattcgcaatgcccggacggcggacggttccgctccggtggatcttctggtttccggaggggtaatcgccgcaaaggcccccgccgggacgctcccggaggatgccgcagaaaaggtgctggacgcctccggaaagctggttctgcccggcctgtttgaccttcacgcccacctgtgccagcccggacgggaagacaaggagcgcgtggccacggctaccgcggcggccctgcatggcggcgtgaccggcctgatggccatgccggataccgatcccgtgatggacaatgccgcccagatcaccacgttcatggaaatatgccgcacggacgcgctggtggaggtcatcccctccggctgcctgaccaagggggacggcggggaagagcaggcctcctatgactccctgcgcgccaagggtgtgcgcttcatcacggacggggaccgcgcgccggacaacatgctgctgctgtatcgcgccatgcagtacgccagcaacctgaacctcaccttcgccctgcggggggacgtgccgtccctgacggccaaggccaccatgcacccgggcaccacctcctaccgcctgggattgacgggctctccctcctgcgcggaggaaataggaatggaaaccatcatccgcctttccgtggatacgggcaactccctgcatgtgcagaccgtttccaccgccggcagcgtggacatcctgcgccgctgcaagccggtgaccgccgggctgagcgcggaaacggcgctccaccacctcctcttcacgcatgaagacgtgggccgctacgataccagctacaagacgctcccgcccctgcgcgggcagtcggacgtggacgccctgatcgccgcggtgaatgacggcatcattgactgcatcgtctccgaccacacgccctgcacgccgttctccaagcttcaggacttcgtcgtcgcgccgcagggaatgattgcgctggatacgttcctgcccgccatttaccagtatctggtggaacccgggaaaatgtcctggcagacggtggcgcgcgcctgcagtgacgctccccgcaggctcatggggctggctcccgtttctttggaagaaggcgctccggccaatctggtggtgtttgacccggagggtgaaacgcccgtcacggatgaaacgctccgcagccgcgcccggaacacccctttcctgggcaaaaccctgaaagggaaggtggaagccgtagtgctcggtgaagaacttcacagtttttaacgttcactgttaactattaattattaactgttcatttgcttgcatcctgtcgcccgcgtcagcacgtgttatccggacaagttcggcgtaccgcgccagagcgggctggttccgggtgcgcgtgcgcggctggtatttgagccgccgttccgtcatccggatgccgtccgcggcctggaagggttttcccacctgtggctgatctgggtattcagtgaaaacgtaaacgagggatggagccctacggtccggcctccgcggctggggggcaacgtgcgcatgggcgtgttcgccacgcgcgcgccgttccgtcccaaccccatcggcctgtccgccgtcaggctggaaaaggtggaactgcacccgcaggatggcccggtgctgcacctttccggcgtggacctggtggacggcacgcccattctggacatcaagccatatgttccgctggcggactgcattccggaggcttcggaaggatttacggctgttccctatgaacggctggacgtggaaatccccgccgctcttggctgcaccatgaccccggaggaacggaaagcgctggcggatacgctggccctggatccgcgcccgcagtaccaggacgatccggaacgggtttacggcctcctgttttccggctgggaggtgaaattcagggtggaaggcagccggctgctggtgctggccctccatgaagtcaaagctgggtgaagtacggcgcgggaggcatgaggcgagcagcatgccatcgctggaagggggaaatcgtatggaaaactgcttcttctcccgtgtctgatgcgctttttcttttgcctgcaactcctctcccttgatgccggagtggctggccccggaggactcaggaggctgcgccaggaggaagtggaagatgcaaggtaccggaaaactttccttctgccgcgttctatgggctcccgccctctgtttcaggggtctttttcaaggcagggccggggcttgctttacatgaccggggggagtaaccttccgcccggacttcggaggtagcgccggggtgtttaaggggatgaacaatgaccgtcagatagttgaagcgtttgaaaggaacttccgtgactacggggaactgggcgcctccgtttccgtctggaaggacggaaaggaaatcgtttcccttcattccgggtttgccgtagcggatgaaacgcgcccgtggacggaacactcgctggtgcccgtttactctgctaccaagggagcctcttccgccgccctgctgctggccctgcaccggcagggagcctcaccgcagatgagcatgggggaactgtggccggaattcccgctgccttacgcatccatcgcgcagatgatgtcccaccagtgcggcctggcagccttttcccggacggccagcgtgtttgaccatgaggacggcgtgcgcgccctggaggaaaccgttccggcgtggcagcccccggagcacggctaccatccgcatacctacggcgtgatgctggatgaactcatgctgcgcctgaccggggaacgcctgtggcgttactgggaggaatacatccgtacgccgctggacctggacttttacatccgcctgccggaatccgaattcagccgggtggcgaccttgtaccccggcaagatggacatgttcaacatgggcacgccgttttatcaggaatacatgaaaaaaggcacgcccgtgaaccgcgcgttcaacaccctgacaggcctgaacagcgtgcgccagatgaacacgccggaagcgtggacgtccggagccccggcattcggcggcgtggcctccgcccgcggcatggcgcaattctaccaggcctgcctggggctggatgaattacggatattcccttccgccgtgcgcggctggatgcgggacattgtcattgacggcccggacctgaccctgaaaacgcccactgccttttcctgcggcttcatgcacgatcccgcggatcccgtcacgggccgcaagctgcgccgcctgttcggttccggcggcttcgggcacgccggggcgggcggctcccacgcctttgcggacccggtccgcggcctctccttcggctacgcgatgaaccgcatggacctgaacgtgctgcccggcgtgaagacccggaaccttatcagcgcagtgatgaaggaaatggaggagaggccggaggcctgacctttctcccggaaagaactggagggcggaggaagaaaaaccgttcttcctgagtaggagggagattttccgtatgcgccgtctctttcaagtacggttgttttcgggagcctgcgccgctccttctccaatggtctcattgggtatccagccttcctcccggtcgcttgttctccggacccacgtccactcgttcagcgtcctgatcttgaggatctcttcccccgggtctacgtccaattccctggcgctgtaatcttccagcaccgttccccgcgttccgtctcccggaaagtcaatcaattgaacgggaacccagcctcctgtccctttactgttttccgcccatatccagtccttccagttttcctccggagctctttcccccagcgtaacgatttccccctttttcaatttgatgggatgttcatattccgtcctgtgtgaagctatcgttttaaagattacctggggggcgccgtttgttttcatgtggtgatgattttctgttttcagtgagatggcctctgttggaacccgtgtgccggattccggttcggttctcccctatcctgcctgtagtcccgtcatccttcaatcctgtattgaagcttccccgtcaggaatgggactctattatcggtggttttgtgcaaatccgcgatgataagaagaaaaagtaagtcgtattttcctaatacaggagtacatgaggacgaaggagtaaccgtgatggataaattatttttaccgttttcttactaaaccatttcatttatttatacaaacgactaatagtaattgtatttcgacgtgaccgatttcggccatgcctacccgttcacattacatatttctaccggatgttagataatttagtgcttagcctgaccgaaaatgcctttgactctttagtagaggaatatattcaagatcattcatattatagatattgaaatatgattcagttttgatattattatcctcctatggaaatttttttcattcggtcaagaaaatgattacggaagagaagagatagcaaaaaggtatcttcacttgatagatatttgtaattcggaaatctcccctacactactctatggaaattggggaacgggaaagactactttttgtaagaaactcattagtatgcttgaacatttgcgccaagagaatagtgataaaatataccttactcccatatatttggatgcttttcttaccgattatatagacaatccattattatctatagtagcagcactttctaatcttgatgttatgcaaataggagttaaagataaaattattgatgctattaagggtttaacttctccgcaaaaggctggaacgctactatctgaaattggtctcaatttacttggagtatgtacaaatggatttagtgatcaagtcataaaaacatccatggaagaattaagaaatttcaataagcaatctataaattcttttgctataaatagtctgcttgacgattatgcggacgcatgcaagagcatgaaaatactgcaatcggctatcaccgaaatatgtaaagaaaaacctgttttgttaattattgatgaattggatagatgtaaacctgactatgctattaaaatgttggaaaccatcaaacattttcatgatattgaaaaatttgtatatacttttagtggtcaatcgccagcaactttgtgcaagtattgagaagcattatggatataagataaatgcaaatgaatatcttgagaagtttttttcatattcatttgaattgtcaatgttgcaacctaatgtaatggatatctcaagatgtaatgaaattctttttcgatacatcgaagaacaggttgagcaagatgaaagaatgccgaagactattgaaaatagtaagtatagtagctatacttactattctcctattaaggcggcgttattccatttaaatcccagtatgagacaactaaacacttttattcgacatattaagttatatggaatgcttgtaaaatacaggaataatgagaatttacaagaaggatattctgataaatgttgtcctcttattcaatctacaacatatttagctataatggctttttgtttttatccaagtattagaagccagtgtttgaataattctttagagataaattcacttgcagaagaaatgttcggtattcaccaacttcacctgactgatacttgtaaatctaaagatgaagagttaatagaatgggcattaatagctctttatcgtcaaagtttaccgtacgaagaaaaggaacaagtggaggagaatatatggtggagaaagtatattacttgtgatatggttagcccatcatttaattcttacgaacattttatgaatgttgtcaaaattctggcgctatggtaaaattattacaaagacaactgtgataatttagtttttaagtaggatatcttgaaatgttgacaaatccatagtattaccatccgccgcccagggcgcgggcgagctgcacgacggccttgcggatgttctgcttcatggtgaccagggattcctccgagctgagccaggagcgctgcgcggtgatgacgttcaggaagtccgtctggccgttgatgtacagggtgcgggagagcaggaaggcttctctgttggcgttgttttccttgtgcaggtattgcatctgggaggtgtagttgccgtaggcgatcagggcgtcctccacctcggagacggcggtgatgagcgtcttgcggtaggtttccgcggcttgttccgccgcggctttctgagcgcgcaccgtggctctcagggctccgccctggaacaggggctggagcaggttgccgcccagggaccacgcgttgttgttttcccggaagagctggccgaagtcccctccgcggctggagagggatcccgtcaggctgaagcgggggtacaggtccgccacggctacgcctacgttggctacggccacgtgcaggtccgcttcagcggcgatgacgtcgggcctgcgccgcaggagttcggaggggaggccgaccggcacgacgggcgttttttcaaagacggaggctttggggagcgtcagctccacgcgggagttgtacgtgcccagcagcacggagagctggtttttggcggaggccacctgtgcttccagcgccgggatgcggctttccgtggaggcgacggtggaggtggcctgttccacgtccaggcggggggcgaattccgatttgtagcgtttttccgcaatggtgagggtgttgcgttggatttccagctgttcccgggcgatgcggagctgttcgcaggcggtgatccagtcaaagtaggccgtggcgacgtccgccagcagggccgtgcgcacggcgcccgcggaggcttccgtagacatgagggaggcgcggtaggcctcaatggaacgccggttgccgccgaagaggtccagctcccaggaggtggacgcccccagggtgaagtcctgggaggtggagctgcggaagccccggtccggggacaggctccagccggcgctggcgtctgcggagggcagcagggaggcctgggagatgcggagcctttccctggcttcccggatgcggagcagggccaccttcatatccggattgttgttgagggaggtggagaccaggcggttgagctgggggtccccgaagatgttccaccaggagcgcaggtccttgtcagagctgcgggggggcctgctctccgcccaggcggcggggaggtcgttggccggcggccggaagtccgggcctaccatgcaggagctcaggcagcatgcggccaggagagggagatgtttgaacatggatgacatgggaaagaaagaagtaaggtgttattcgtgtcgcagggcgtcgatggggtccatcttggacgccttccaggacggataccatccgaaggccaggccgatgaacacggagacgcccaccgccagggccatggcttccggggaggaggcggtggcccagttcatcgtgcggctgacgatgatggagatggccttgccgagcgcgatgcccagcgcgccgcccaccacgcagagcagaaccgcttccagcaggaactggcgcatgatgtcctgcggacgggcgcccaccgccatgcgcaggccgatttccttggtgcgctccgtgacggagacgagcatgatgttcatgatgcccacgccgcctacgaccagggagatcatggccacgatcatcagcaggttggtcattacttccgtggtgctgctcatggcgcgggacatttcagccatgtcccatacccggaagtcgtccagctggccgtccttgaggttgtgcttggcgcggatgacttccgtgatctggtcgatcgcctcggaggagcgctccgggtccgcaatctgcgccatgatggagtcaatgttgttgaagcgccgcgggtggggggcgtccgtgtagggctggtccgtggtttccgtgtagtaatccacggaattggcggtgtatttgtccgcccggttgaaggtggtggtggatttgccggaggaagtggaggcggaaccgccgcccaggccctggaggcggtagcggatgctcgtccagggcaggatgatggagtcgtcctggtcgcggcccatcatgttggcgccctttttctggaggatgccgatgaccttgaacatgacgttcttgatgcggatgtccttgcccagcgggtcttcatccccgaagagctccctggctaccgtctggccgatgacgcacacgcgcctggcctgctccacgtcttcctcggagaagggctggccgcggtccatgtcataccagctcttgattttcaggtattccacggaaccgccttccacggtttccgggctccagttcttgttgccgtaaatgacctggccgctggcgcgcactacgggcgtggcgcgcaggaccatggggcagtccttcgcgatggcctcgcagtccgcgttggtcagggaggcccggccgcctgcgccggtattgacgccgctcttggagatggcgccggggcggatgttcagcgtatccgcccccatggaggcgatggtgtttttaatctggagcgtggacccctggccgatttccaccatggcgatcaccgctgcaatgccgatgatgatgcccaggatggtgagcgccgcgcgcatggggttgcgcaccagggccttgatgcaggttttaaggaggggaaggaatttcatacgtcgtccttgcttagcgtgtcggaaatcccttcgcagatgaggccgtccgccatgttgatggcccggtccgtgaaggcggctattttggggtcgtgcgtcaccaggatgaccgtgattccctggcggcggttcaggtccttgaacatgtgcagcacttccttggaggtggtggagtccaggttgcccgtaggctcgtccgccagcaggatgctgggattgttgatgagggagcgggcgatggctacgcgctgctgctggccgccggagagctgggcgggggtgtggtccatgcggtcggaaaggcccaccaggttcagcagctccaccgaacgttcgcgcatggctttcatgctgagggtggggtgggcgtacacggcgggcatcatcacgttttccagggcggtggtgcgggagagcaggttgaagttctggaagacgaagccgatacgcttgttccggagcgtggcgcgctctgcggcgttgaatttggctacgtcttccccggcgatgtagtaatggccggaggtggggcggtccaggcagcccaggatgttcatcaaggtggactttccggaaccggaagcccccgtgagggagacgaattccccctccttgatgtccagggtgatgcccttgagcacttgaaggtcaatttcccccaggtggtacaccttggttatgtcacgtaagcggatcacgttgttgtagtgcttgaagcggtaaaaaggaatggttgagcgggtggatggaggcgtttccccggatcagggaggcgggggcggcccgccgttgccggaggcggagggagccttcgtgttgcccgtgctcggcttgcggcgcggcggcatcttgggcgcgaacggattttccccgccggcggaggcggaagctccgtcctccgagttgccggagcggttcagtatctgcgccgtggagacgatttccatgccttcccggagcgtttctcccgtgatggccgtcagcatgccgttgctttcccccctggtgaccaggtgggggtaaagaagattgtcccgcagttcccagaccacggcttttttcttctggccgttttgggcgggagcggccagttccggctgcatccgttcaaaggccgccttctgctcggcgctgaccaattccgtttccggacggaagcggagcgcggcgttggagacgaggaaggcgtcccggatgtcctccaccacgaattgaacgtttgccgtcaggtaggggatgaggagcttgtccgggttgggcacgtcaatgtccacgatgtaggtgaccacgttggaggtcatggtggcgtccagacgtatcttgtccactgttcccttgaatttgcggccggagaaggcgtccacggtgaacaggacttcctgccccttgcggatgctgccgatgtccgcctcattcacggcggcccagattttcagcttggaaaggtccgtggcaatgtaaaacaggctggaggcgctcatgctggaaaccaccgtctggcctatgttgaccaggcgcttgaccaccacgccgtccaccggggactggatggtggtgtattccaggttgcgcatttccttcttaagcgcggcttccgcctgtttcagagaggcttccgcttcctgcagggaggcttccgccacggccacgttggcgcgtgcggtctcttcatccgcaatgtactggtcgtagctggacttggaaagggcatcccctggccccagcttttccgcgcgttcgcggtccagcctggcctgctggtgcttggccttggcctgctggatgtccgccttggcgcgggcgattccggcgatggcctgcgccttggaggcttccgcacgctgaacgtccagctgcacgggcagcttgtcgatttccgcgagcatctggcccgccttcaccgggctggaataatccaccaccttgccgtccagatccttgccgaactccatgatgatgccgctgacctgggcgcccacgtccaccagttcatccggttccgtgacgccggtcgcgtcaatggtgatcatcaggtcccccttctcaagaggctctgtctggtagtccacctggatcgcttcgttccccttccactgttcccaggcgaaccagatgcctccgagaacggcaatgacgatgatgagtttgatgaatcccttcacgactataatatacttcgcaataatgaaaaagttgcacagatgttaaaaactttttcgcaacagggcgtgatcctaccatgatttccggaaatgtctaagggtttattttgttcgttaacagttgttatttataaactaacaatattacattatcgtaatgggctgtcccttttttacggatttgtaagaatatggaggaaggccgtttccggaatggtcccaggaatgaattgataaccatcgtgtttcatccatgggtaaaaattggcacgcttcttgctggatacaagatgaaggatcgcacgatccggaaacaaccaatcaaccatatgtacaagaacgatttatttgacctgatgttcaggctgcttcattccttctgccgttcctcccggccgccccggaaggagaaggagcgggagcggaaggcccggaaatatttgaaggccatggtggcgaacgcgcgcatgcgttccttttaagcgcgtgtgcgcttcctgccgggaaatgccgtggggcgcagaggtgcgggaaaaagcaataaaagcagccgtgccggaatgctttgattccggtgcggattcaagagggggccatcgggaaaacaggccccggcggggttcccggctgcaagggaaagagaaagacaccgctgcaccgtctctggctgtgagccacgttcccgtgcctcaatagagaggggacttccgccgctgttttgacttttccggtataggacatagtcagccctgcgtcggggctgcccccattaggttgtaatatcggttcgggccactttgccaggtaatgacgagtgcagcagccaccaccttatataccccagaagggggaatgatccaaggtgtttttggaatcttttcagacatgcgcaggcaatcctccgcggagtgtttgaagctgaacgggctgccgttttgtcagcggttttcttccatccactgccttaaaacggggaggtctgcgggagcccagggcagtttttccagcatgcggccggagaagaagcccaggctttcgtgttccaggggccggggcagggcgcagggctccagacggcacaggaaggggatgaggcggatgatgcgttcccgttcccggtgccggacgggggtgagcatgcggacgggatggacggcgcatcccagttcttcccgtatttcccggatgatggcgtcccgggcgttctctccgggttccacctttccgccggggaattcataaaaaagcccgttggactgccccgctttctttttggctcccaggagaagggttccttgtgcggagggcagttcaatcagggcgcagcagacgtccaggatgttcatcatgcgttgaaatccagagaatgcaggttcatgatgcgggaatccgtgtccagaatgccgaagccgatgcggccggtcctgccctggagttcccccggattggccagcaggcacccgcggtacatttcccgcacggcctggtgggtgtggccgtacagggcggcgtccacactgccgctgcgcgcttcctgcatggcgtatttgggatagtgggagagggagaacttcatgccgtacctggtgagcaggacgtgttccgggtgcaggcgcgccgccggggagcaggcggccagttggcgcatgatggcaagctcgtagtcgttgttgcccggaacggcgtccagagggaggccccccgtcagttcaatcaggcgctggaagctctccggggtggtgcagtcgcccaggaacatgaaatgtccgcagtccagcaggagcatctggcgcatcgcaagctccaggtggtccgtgcggtcgtgcatgtcggaaaaaacgcctatcttcatggtgttggtcggttcatggcatggatgggccaggcctttaattcgtccggcaggggaggcaggggcgcatgctctccctcccggcgcagcaggcaggtgaagccgcccgcgcccgcgccgtgaaaaggcatgagccggtagcaggcctcctgcgtcagggcggaacggaaaggctccagctccggcacggctgcggtccgcaggtccggacagcgtttcagcaggtacaggacgttccgttcgttctcctccggggcgtaggtgcatgtggtgtacagcagatagcctccgggcgccaggcactggagggccgccagcagaatgccccgctgccgcttggcgttgccgccggtgacggaggggttgaagcagccggggttgggaatgcccttggtcagcagggattgaccgctgcacggggcgtccgccagaatgaggtcaaagcagcccggggccagctccgcccactggtccgggcgcagacgctgggtatatacgctggtgaagccgcagcgcagcaggttgtggcgcaggatgcccaggcgcttcgggtgcacctcgttggagacgtgctcccgcggggcggtccgcgtctgggccagaatgcttttcccgccgggagccgcgcacatgtccaggcagcgttccggccggaacggcagatgcgccagcggagccgtctcccagacggaagagaggtccaggggatagtaatagccgcgttcgtagtccggcagggagccgggtctggcctccgcctctcccgccgggatcgccaggatggaagggtggccccagtcccgcggcgtttcctccgccggcaggggcggcaggtagccttccggagctttcggggtgatgaccagcgcgcttctggaacggtcccctgcctgcatggcgtccagaaaatcctgctcctgttccgctgtcagctccagcttgcgggtgagcctcagtatttgggaggtggacacgagatcaggcccggaacgtttcgccgaaatgggtgttgagcgccagatgggcggaccccaggatacccgcctccgtgccgaactgggcggggaggatttcaagatgctccaccagcggagcggcaagctgggtcttcatgatctcctgaaggggctggaagagcagggtcttggccttggccacgccgccgccgatgatgatggcctccgggttcaggaggtagcagcagttcatcagcgcgcaggagagctttacggccaggtcgcgccagacctgcgcggctacttcgtcccccgccagcgcggcccgttccagggcgatggggttgcagtccacaatggccttgtcaacgccgtggctggcgtacagggtgcgggcgtccgccgctatttcccggttgcccacgtaatcctccagggaaccgcggttgccgtaatggcccagccgcccccggtagtcgatgctggtctggcccagttccccggcggagcaggtagccccgcgcaggagctccccgttcacgatgagtccgctgcccacgccggtgcccagggtcaggcagaccaggtgccttttcccctttccggctcccagcttccactccgcgtaggccatgcagttggcgtcgttctccacgtacacgggcagtccgcaggcggcctggagcatgtcccttaccggaacgttgttccagccgggcacgttggtgagcgtataaacggtgccctgataaaaattgacgaagccgggcatccccatgccgatggcctgcacttccggatggttcagccgcagcatgttcacgaactgggcgatggcttcaatcagttggtcgggattgccgtattcctgggtggcgatggaaggcgcgtgcgcgatcacttccgtgcctttgacgacccccagcttgatggaggtgcccccgaagtcaatgccgatggagggaatggttgaagctgtcatatggtaccaatatagaattttgccgggcgttgaaaaggttaaaagaagtatgcttccgttaaaaaaacggcaggcggggcagcgggaaaaatgacttgtttcatagctgaattttcttgaatgaacatttgagcgcttgtagtgtctcatagtctagtcagttgggcggtttcgcccgctgttcgtgaaacatcgtcaacctcagcccatagagacacctcctatgcctactcccaagaaaaccgatagcaagaccgtcgccaaggaagctccggcccccaagaaaaagacctgcgggaagtccgcctgcaagaccgctgtagagcaggaggctccggccaggaaaaagtgctgcaggaaaaaggccgctgaaccggaaaaagccgccaagcccgccaaaaaggccgctgcccccgcggctgctgtggaaaagaagacggaaccgaaaacggcccggaaggccccggccagaaaaaccgcttcctcccccgccgccccggctcccgctgccgcaaagaatgaattgacggatgagcagacggaagccatcgccgccgccaaggctgaactggccgccaatccggaatgggaaccctttgtgcagatgcagcgccagcacctgatggacctgcgcgacagggccctggacaacatgagcggcgtggcccgcgataccctccggaaccatccggaaggcagtgaagcctccggctccggggaacaccaggcggatgccgggagcgacgcctatgaccgcgactttgcgctcagcctgctttccaaggaacaggacggcctgtatgagattgaacaggcgctcgcccgcattgacaacggaacgtacggcatctgtgaaatgtcatacaaggtcattcccatcctgcggctggaggccattcccttcgcgcggctcacggtggaatgccaggcccagtgggaaaaggaaaaagggcagaacgcccggttccgccccagagtggccctgggctttgcgggaggacaaaatgatgtagatttatctgtttctcttgacgatgacgaagaatagtgtataaatcctcccccgtaacacattttcatcatgccaagagacatcatcatcctcgaatgcaccgaggctaaagccgaaggaaagcctacgtcccgctacgtcaccacgcgcaacaagaagagcctgcgtacccccggccgcctggaaaaggttaagtacaatcctttcctgaagcgccgcacgcttcatcgtgaaatgcgttaaccgcggtccagctcatcgattatctttattactatgtccactgaacccaagactgtagaacgtcgtattcgtttccgcacgtgcaatcgccagatgccgcgccgccgtctcgacatcccgatggatcaggtcgatctgctcaaccccgatttcctgtccaagttcacctctgaaaccggcaagattcttccccgccgcgtgaccgggctgtccgccaagatgcaccgcaaggtgacccgtgaaatcaagcgggcccgttccatcaaccttctgccgtaacaagccccaaggaaatctctttcggtagaaattgtctttgcaggcgggagtttgtccggtaacagggcagactcccgctttatttccagccaacatcctccttccgcatgcaggaactgaaagatacccagtccgagacggatacgcgcaatatctccattgaccgggtgggcgtcaaggggctgcgctttcccatccagatccaggacaagctcaaccgcatccagtctaccgtggcgacggtttccctggcggtggacttgccggaggaattcaagggcacgcacatgagccgctttgtggaggccctgcaccagcacggccccctgctggacgtgcatacggccctggccattccccgggaactgctccgccgcctgtccgcgcgccgctcccatgtggaaatggagtttccgttcttccgcgccaaaaacgcccccgtaaccggaattgaagggctcatggactacgtggtccggtttgagatggaggcggaagcggacaacaagctggcggacttcaagctgacggtggtcgtcccggtgacgacgctctgcccctgttccaaggccatgagcgcctatggggcccacaaccagcgcgggctggtcacctactccgtgcgcttcgcctcccggcccgtctggattgaagacctgattgacctagtggaatcctgcgccagctgttccctgtacagcgtgctgaaaaggccggatgaaaaatgggtgacggaaagggcttatgaaaaccccgtctttgtggaagacctggtgcgcaacgtggcgctgaaaacgcagagccactccgctttcagctggtaccgggtggaggcggaaaactttgaatccatccacaaccaccaggcgtatgccgtcattgaacgcgacctgcgttcctgagctgctttccgtacaggacttatgaacgacaactggtgggccattgcatctctcgtcctgtccctggcttttacggggcttggctggcggctgctggcctccggccgccggtttttatacgcccacctctggatggcgtgcctctttgcgctccagacgggggcgctttgcgtcaaggcgtaccagacggggatgtgccccatccgcggcgcgtcggaggtgctcttcttcctctcctggaccatcaacctcttttatcttcttctggggcgcgcctatcgcatgtccgtgctgggcatcttcaccgctccggccattgccgtgctgacggcgctttccctgctgatcggcctgtacggcgcggatgtgcagggtacgcatgacttctgggtgacggcgcacgtgggcgtagccatgatgtcctacggagccggaggcctggccgccgctgcgggcgtggcgttctgcatgcagaacgaatgcctcaaaaggcggcagatacccggcacctgccgtcttctgccccctatccgcacgctggaagccagcatgaagcgcctggttctggtggcgttcctcctgcttctggccggggaatggctcggctggcagaggcatctccccatcaacggggccaaaacctccatcgtcattctgctgacgctgggctacagcattctgctgtggttcatctaccgccgcggcatgccggggcgcgccctggcctactgctgtgtggccctctttattgcatccatgagcattttcctggtaagctgatgagaatggtttgtttaggcttgaatcaccggaccgctcccgtggaaatacgggagcgctttgccgtgccgtcccacaggctccaggaggaggggcggcgcatccgctccctgccggacgtggaccagtgcgtggtgctttccacctgcaaccgcatggaaatctactactggtctgacaggccggaaagcgcgcaggaacacatcctgtcccacttcctgggagcgggccgcgggaacgtggacatggcctcccacttttacagccatctgggggcggatgccctggagcacctgtgccgcgtcctgagcgggctggactccatggtgctgggggaaacggaaatcttcgggcaggtgaagacggcctaccagatggcgctggacgccggagtgaccgcggcctgcgccaacaagaccttccagaaagccttcaccatcggcaagagggtgcggacggacagccagattcacgccggagccacctccgtggggtccgtggccgtggagctggcggaacaaatcttcggcgacctttccggcacccgcgtcctcatcctgggagccggggagatgagccgcgtcacgggccgcgccctgcacgcccgcggggcggagggcatctatgtagccaaccgttcctttgaccgggcggtggaactggcgggcatgatcggcggccaggccatccggtacgacgtgtggggggactacctcagggacattgacgtggtggtggccgccaccgccgccccccactgcatcatcacccgggagacgctgctgccgctgcgcgcgccccgcaagtaccgctccctcttcctgattgacatctccgtgccgcgcaacatctctccggacgtggcggatattgacgaggtgtacctctacgatatcgacaccctcacccagctggcggatgaagccaagcgcagccgggagcaggaagtctcccggtgcgaggccatcatccaggacaacatctccaaatactttccggactccgcgctttatgaccagtaaaaacaccctcatcatcggcacccgcgggagcgccctggcgctggcccaggcggacatggtccgggccgccctctccctccgttatccggaactggacgtgcgccgggaaatcatccataccaccggggaccgccgcacggacgtgccgctggcggacgtggcccgcgtttccggcatcgtggacaagggaatcttcatcaaggaactggaaaccgccctcctggaaggccgcattgacgtggcggtgcacagcctcaaggacgtgcccagcgagctggcccccggtttcacgctgggcgccgtgctgccccgcgccgccgtagaagacgtgcttattacgagggagccggactggaacggctccggcacgctggctaccggaagcgtgcgccgccgcctgatggcgcgcacgtactggggttccggcctccggtttgaagacctgcggggcaacgtgcccacgcgcctggcgaagctggcggagcatcccggctgggacgccgtaattctggccagggccggactggaacgcctggggctgtatgcgccggaaaccctcgtggaggggaggaagctctacatgcgccccctgccggtggaagccttcattcccgccgtggggcagggcatcgtgggcatggaatgccgctcttccgaccgggagacgatggaaatgctggctggaatcagcgatccggaagccttcgcctgcgctctggcggaacgcgccttcctggtgcgcctgggagcgagctgttccacgcccgtgggcgtttacgcccgtttggaagggcatgaactggtcctgcgtgcggcgtactacgcgccgggcagggaagaaccttttgccgtggtggtccgcggggaccggaaggagcccggggccctcggccttcgtgcgtttgaagaattggacctgcgctgacggggtgcgctcttccgctttttccggagcggacagggataaaaaaaggttccggaccaagtccggaacctgaattaagcagagagctcacggggaattaatgtttttccttggagcttgagcctttatcgctcataaactgcccggttgaagcatcgcgcttgacgcgctgcccggttttgttcgtggtggtttcggagcgcttcttggaagaaccgcttttgtgatttccacccatgtgggaactacttgccatgttgtttcacctcctttccattttcttcgcctgttcatgaacgagagaagaaatccggccatatcataggtccctgtaacagcattggggcctctaaacggctcttgtgcaaaaatgcgcccccgtttatgaagaagaccgctgcataagataatccctcagggccgccgcttcattgtgctccgtatttctggcggagtacagcaatgtaagcttccctttccgcgcgagctggagcagatgggaaacggcctccttgttcccgtccagttcctcgtcatacttccggcggaaggcgtcccatttggccggatcatgcgcaaaccactggcggagcgccgtggacggagccacatttttcagccattcatcccaggaagccttttccttggaaatcccgcggggccagagacggtccaccagcacgcggtagccgtctccggtttccttcgggtcataaattcgtttgatggttatattcatacgaaaaaagtctgatgaaggaatagagcgggcaaggcttgcttttgttgagctgcgtcgggacatgcgccacccgatgccgtgaatggaaacggcctggtgatggggaaaacggcaaaaaaacggcaccgttccggagagggaacggtgccggagaacatgtggctgaagacacttaaaattccatcataacgcctgctcttccgctctggttcagctgccggttgccggcttccagactgtaatccacgcccgcgctccagttgccggacaggctgacatggaatccggcggaagcctccaggacggtacggccagggttgacggccatggccgtccaggagcgggaggttccacgtacggaaacatgcggcgttttccggtccagatcgtgcgcgattcccgtgcggatgtagcctgccgcttcccgtcccagcagggagccgttccggtggaactccacccccaggcggccgcgcaggacattcgcggagctgtcttccagatggtaggcatggcgttcccctgcggcggtggaggcgctttgaacgctccccgcgtactggaggccggaataaaggcccagccgcgttttccggttcagcctccttgtccatgctccctgtacgtcgagcagccaggttctgtccttccatgagctttccaggcggtctccggccaggtccggggaaataacgccccccttgctgcgggcggagccatagcccccctgcacgcccagaagcagggaatcttccgcgttcacctgcacggaccgcgccagttggagaagggccatgacggcgtcctggtcaaagctgcccaggtcattgttcacatcgttcgtcccgaagctctggccgaaggcgccccccgccgtccagaccggggaaagatcgtaactcccgcccacggaatacccgtgggagcggaagcggtagccttccgccgcggcctgggaggcctgggtgaaataatcccccgtggccgtgatccagaaagccgcgcgcccgtccggcttcagccgttctccctccctggttctggcggcctctgcaaaactgcggaggctgcgcacggcggtccactgggaattgccctgcacgcctcccacgccggacgggggccgccagccccccgtgtccggtccggaaggaacaaggcctctattctgtccggaaaggtaatcgaaaaaggaaccgtccacgctgtagctccacccgtcggcatccaccagccgcacgcttttggctccgttgacgctgtccatcagctcctgcgtctgcccctcatgggaaaaaatgaagaggtgcaattcatcatagggaatgctgaggcggctgacgtccagaacgaactccagggaacccgcaaaggcggcgatggaggaaccttccgtaaaattccatacgggattctcttccgtggccgccgccatggaatcggtcatcctgacgagcacggtatgggcggcacccggcttcacggcatgaacgctgtactggccgtccatcgtcgtaaagccttcaacgatgaaactgcttccctgccatgcatccagcgagccacggatggccgtttcctcccccatgcacaggcttccctggtacaattccgtgttgaatccgtcaatggaagctccgtccttgaaaaagacggttccgtccacgggatagccttccgcaccgggcttgttgatcgtcaaaatgttcctgtcgttctccccccggatgccgtcgtaaaagaccagggagccgccgttcccggcgtaaagggcgatgccggtggaaaacagggagtggatggcattggaagcgccgccgccccccagtgccggaacgtggtccctgttgcctcggaaaatgctgtcccgcccgttggcgataatccggagccgcccttcattcgcaatggctcccccctgcgccagggacgcatctgcggaagaagcgtaattatcgtaaaaggaacaattcaccagcgtcagcgtgcagccgataaaattgtggatggctccccctcctgatgccgtttccgtcatggaagagacatggttgccgttaaagacgcaggaaacaagcgtgcccgtggacccggattccaggttgagcgcgcctccccacgcacggcctgcgctggtggaatgagccgtgcagaaggcataattccccgtaaaagcggcattgctcagcttgatggaggcattgttattcaagttcacggctccaccggaggctgcatagcccatggcgtaattcccgtggaattccagggcatccccttccaggcgcgccccgtacgtggccatggagacggtgcctcccgccgccgtgctcatgccattggccccggcattcaggtaagaagtgtaattaccggagaaacggcagttgctcagggtaacggcgccaaagctggcaatggcgccgccgtactgctgggggctgttcagacacggttcatggaaggagacgtaattattggtgaaatcgcacccctggatactcatcacggaacctgccgccccggcaagcgcgcctccttctccgtttgtctgggaaaccattccgttattggaaaaggaacatccggaaagaatcagcctggcgttctcaccgttggcgatggagccgccggaggaagaggaaaaccagctcacggcggtattgaaattgccggtgatggtgcagtcgctgatttccagtgtgccgcggttgtcaaacgccctgctggtgaaaacctgggcgctctgcttggtggaggagatggtgtggtggcctccattcagcgccagggaagttccctgggagacggtgacggcgcccccgttgcttgttacctctgcaacggaaccgtccccgctcaggtcaagtaccgtttcagtgatggactcgtcctgccagtcccgaacgaggtcatcccaggaaatggggctggaagcggctgcatggggcacggcctgtgacaggagcagggcggcgaggagggggagaggaagtctcggagtcattgatttggaatttgttcttggattgggttttgcggctgtgtccgcaaaacttcccgaagcctgggggattttcaatccgcagaggcagcgttatgaacttgaaaccaagggtttatttctctttcatcctattcctcctcctgtccggaaaaagtgaataagcgtaccggataaggcttaaaaaatcttgccttaaatgaattattgttgacaacggattgaaaatccgatgaatacagaaattttataaaattaccctggggagataagctgctggaccagaagtaacattgaaggcctgctccaaagcatgggctaaatgaatgaagggcgcgggtttcccttcttcgtcagaaactgtccggggaattcaagggaaataaactggcgctccgcgcgggataattgcttgattcacatgattatccagtcgcctgtttcatttcaggaatagttcaccggcataaatcctgaaactctttatttaatattcctctttttatatatttgtgttctggaacaatgcacaaggcatttcaggcaggtgctgcatccatatatgttaacgatctcatctcttgaaacagagatgctccaaattttacctttaagaacttttctctcgcagatattgacacaagcgctgcaccttccgcactttggaaatggaggttcatgtaataccgtttccagtggagcatcagttaaaaccgtaccgagacattgtgctgcgccatattcaggagtaattaacaggttgttttttccaatccaccctaatccgccaagtagcgcgactgttttatgaggtaatactgactctttggtttcatcattgaatacgtcatcagccaccagccccgtatcggattgcgatatggctttataaccctttccggcaatgaacctggctaaatcgtctgctatttcccccgccttatgttcagtttgtgaaaattcatcatcatcgaaatcgtaattgttatctatccgcgcttgtacgtaatcgggagtatcaaataccgtcctgacatactctgcggtcagcgggagtacaaagacaatggcgttcgggagttgcctgttttgcttttcgtctaaatggaatatgctgacaaaacgtatcagttccgctccccggtttcttaattcgttttctatttcttgattcaagtatttcatatttctttttatcagaatttcattttagaaaacgcaggaacggggttggcctgaaaatatcaggacgcccctacttccgccaggaggcatcgggtacggctccgcggtattgcagcgtcaggatcagcatcttgagctcgctgagacgcaggtcgtgttccttcctgacctcgggattcagagagccgtgaaacagccattgattcgtctgggcggacatcaggcgctgggccgtcagcgccatggacagggcctgccccggagactgggccgcaatggccgcgctccaggaatacagcatattactgtaaatggtggtccaggcgaacatgcggtcgtcaaacctgccgggactctccacataggggcgcagcagcctctccgcctccgcaaggcgcccctggcggatgtaaagcaggcttttggccgctgccaggccgtgattgccgggactccgcaattccgcctcttcctcctgccgttccagttccctgagccgcgcctcgtctggagcggcaggactgcccacggcatgcaggatgctgcgccgcaccaggtccgggtccaggctgctggaagcggcctcttccagcatgggaagccgttcgttggaggaaaccggaacggcccggagggaggccttccagaccgggaaagcccggaacgcgtagcacagggccagcgccgccagcagcagcgcggcggaggcctggaaccagcgtccggcgcgccgggaggccttcacccgggaaagggaggcggtgcaggtaatgccgcagcacagggcgctggcgcccagcaatgccggattgtgccagatgaactccccataggcatggaaggcggcgatgcacagcacgcagaaggccgccggccccaggggattggcgcgctggtgttcccccgccagcttgagcacgctccggaacccggaaaagaggaacaggaccagcagggccagcatcagccccagcccggcataaccgtagtcgcaggcggcctgcgcgtactcatggtgggcgaaattggggaggctggccccggcaaaaaactccgtggaaaggttggtgaacatccggctgccgtggccgaaccatggggcctggtccgccagcgcccacgccagtttggacaggtccagacggctcccgaaggagaacgtatccagcagggaggccagctttccggctccgttggccaggtccagcacggcataagccgctcccaggaagagaagcagaatgaacaggatggccgccgtataaaatttcctgttattgcggaaaacgctggaggtataaatgaaaaagcacagggtgacgccagccagcgcattcggaaaggcggcgcgggaactgcaggtgaaggaaacgagaacgagcgccagccccgtgaacaggctgatgccccatttcctggcggaagccatgttgtacgcgcagaggaaaaatcccgtgacggacaggaaatgagcggaaaaattcttgtacccgaagagtccgatgttgcgcagctccgttccgaacagggaataatccggcctgaaccaggaggcctccgtacccgtcatgttctggtacccccacagcagggcgttcagcaatcccagcgccgccgccagcacgggaagaacgctcctttccccattcccggctccggcatacgcccccgccatgaacatggccatggccgtgacgatgaggcccaggtccgccactccctcatagtaaaaccagggtgaaaaccacgcccgcaggaggaaatagccgcctcccagccccagcgccagccatcccggcagcccggggctgggaatcttgtacccccggaggatgcagaagcagaacagcagaagggccgccgccagaaggcaggcgggaagaaaaagggtgtgccactccccacctgccgccgccgtcgccagaagggcgtaaaaaagggccagcagggccatcagggcttttccggcggcggtttcagcaatgcgtggtgcggaaggcttgctgggggcggggtctggcatggctgggaacgggctggatgacggcagggaaggtaacattataaacgcgggacccccccttgccaagagcaagcttccgtacaggacgggatggatgcggcggcccgcgcgttaaaaccggatgggccggaaaagggggaggaaagggagataaaaggaatggagtgaaaaacggctttcagggagaaccgcaggcttctgcggcatctggataaaaacgcggacgaagggcgccatttcaaaaacacgcgcttttttatcctctttgattcttgcgcgctggagcccggtttcccttcagccgcggcaaaggcctgctgctcttctgcgcggccttccgtttcaaatgtggagctgaaagaccaggtatccggccttccgctttcccggcccgttacgcctggatgccgaatttgcgtttgatctccggaatggaataattcaccagcgtgggcttgccgcccggggtgcagtacggcacttcgcaggccagcagttctttcaggatggccggggcgcggtgcggggaaatacgttccttccaggcggatttcctggcgatttccccgatgaaggtctcataagccatgcgtttggcgttccggctgaattcggactgggtgaggcggtccaccagctccagcaggaaggcgcgggcgttctccagttccagcagggcgggcagggattctatcctgatcgtattctggccgaagggcgtgacggtcattccggcctggtcaaagtggggtgcgaactgctggataacggcaaaatcccgcgggtccaggtccagcatcaccgggtccagaagctgctgggacggcatgggcgcttcccggtgcgcccgcagccgttcaaagatgatgcgttcccgcgcggccctgggatgcatcagcaccaggccctccggcgtttcaaacagggcgaattgctggcggagggttcccagataggtgaatccggcggaggcgtccctctccggaactgcctttccgcaggcgtcccttgcgccgccgccctccgcctgatgctggaaatccagcttcccctgggtggcgggaacctgcttcaggggaatgggacgcagggggggaagaggaacagtctcccgtgattgcctgctggggacgggggaagaaagggaagggaggttggaggaaggagcgggggccgtgcggggttttgccggaggaaaggcctgggaattgtccgcccgggagggtgtttccccacgcggcgcggcggaaagcggttccggagggccgccgtccgtctccggcacggcggcgggagcgtgaatttcctgccgggcgtgtttttggagggtgttggcaatcgcctccacaatggtattcaccacatccgcggaccggcggaacctcacttccttcttggcggggtgcacgttgacgtccaccagcgcgggctccacctccatgtacaggaagagcgccggatgcagcccggtgggaaaaccgccgtagccgtcccggatggcccggttgatgagctggtcctccacggggcgggtgttcatgaagacgtactgcccctttctggtgcgcctggcctcggaaagcgggagcaggaagcccgtgacggaaatgccgggcccgatggtcgtttctatcggaatcagggctgccgccgtagccgcatccgtcagcgcggagatgcggacgcgcagatccgccgtggccggaaggtcgaagacgagctggtcgtcccgcttgtaggcaaagcgcacctggggataggccagggcatgcaggcgtatctggtgctccacatgggaggcctccgtctccgcggatttcaggaacttgcggcgtgccggggtattgtaaaacaggtcggagacctcaatggcggtgccgggggagacgccggaacttctcggctcgtgctccatgcctccttcgatgcgtacttcccagccctccagcgcctgctgctgcctggtgcagagcttgaagcgggagacgctggcaatgctgggaatggcctccccgcggaagcccaggtgagtgatttcaaacaggtcctccagggaggaaagcttgctggtggcgtgccgcttggcgcacaggcacgcgtcttcccgggacatgccgcagccgtcgtccgtcaccttgatcaggcccacgcctccgcggcgtatctccacccgcacggatctggctccggcgtccaggctgttttccaccagctccttcacgacggaggcggggcgttccaccacctcgcccgccgccacctggctggcaagagtgggggacatgacgtggatggagggcatggcggtgacggattgggaagggaagtaacggaaaaagggagcctagccgccggcgacgatggagacgatttccacccggtctccgggagaaaccgtaacccgggaaaaatcctgcggcaggagcgcggagccgttgtgttccacgacgacgggtttgccgttcatgttcaagagttccagaagccgggaaacggaacagggttccgccagtccatacggggctccgttcagcataatttcgttctgggctgccatggcggaagtaaccataccacaacgggtggaaaaatccagaaacataccggggggatggcgtaaaaaagattccggttcaagacggaaggaaaagaaaaaactggcatcgcgtacgggactcgaacccgtgttgcccgcgtgaaaggcgggagtcctagaccgctagacgaacgcgacattaggtttgcagggactgcgcgacggagtaaacacaaccaccgcgcaaaaggcaagaactatttaaccaaggccgcaaaaaagcgtacttacgggagttccctccctcattcttgaaagtgtgaaaacaacctgattcaccaataccaagccaatacaaaaaacttgcatgccaaataatgccaatatataacggcggtatctgctacaaaaactatgcgctatctgctatccatccttactatcctagccatcattggaacagtctggtacaataaccatttgacagtacaacacgaccagaacgtaaatgaactgaactctcaactggaaaagctacaactcactacagagcccaaaatcaataatctggagagaaagataaaggaatcttatgacactcttgacctggaagaagaaacattccggaacaagagggatgcgttagaaactatcctcaaacaaacacaagcacaacaggaacgaacagcacaacagaacgcggaacgggctttacgccgtaaaaaggccgctgtggaaacagcactagctaaccgtgaattaactgctaaggaatgggaagtcacgctggcgacttttaaaacacgacgggcagaatagctaaattacttgataaaaataaacaacagataactcttaataataggaaacttgctgacatcattaaacgtgatacggaagacatagcaagacgggcagacgctatggggtccgccgcccgcgcatcaatggcaagcggaagggctggaggccgtggaacctcttatgcgatcattgaagccaaggaagccatggaaaaaaagcacaggaacatgaacaaagcggttgccctgcaaaacagaaaactcatggaatccatagatactatggaaaaagaattggtccaaatggatcgggcggaagaaaaatttatgcaattgaactctccgcataataaaccagttgcacaccttgaacactctgaagaattcgtggcaaaagtgcccgtaggagaaaaagcacaccaggaccttctaaaactccacgaagaacacaaactctccattaaaaagcttcagaacacaattaacgacctactggacgcaaaaaattctttagaaaccaggcttagcgacgtccgccgtgacatcaacaagcaaaaaatggatattcaagataagcatcagcaaagactgagaaacgctcaattcacaggatacgcaatcattggaattttagcaattcttacgctcatttctttttcttttacaaatagatacgcctgataagtcacattgccttcccctctctagtcgtgtcctcacagggtacggcttttttgttgtctaaactctaactgtcacttttgccaaggagtgcagcacttcctgtgtccgggcagcagcttgagaagccaaggggcggcggcctggcgcaatggcggaagctaccgaatgaccattagtcggccgtcaatgcattcttgggggattgcggtagaatggaccctgaccataacggcctaaaagttcatcggccgcaggcacgcctttccggaacggattatgatgccttttgggagttcgtggaagatgaaggcggcgtgtccctggggcgggagcgggattatgactggatgcactttcagtttgcgcggttgtaaataaattgtaataaaggggatattcctgtatatccgcattgccgggttggtcccggactaaagaaaggaggtgtaacatgtgatacttaaccccgaattagtagtacggctgatggaacttattattgttctgactagctaaaagaaagccccggcctggtgacgcaggctggggcgattttttagaggtgtatgcgatacacgaactagtagtaatgccaatatgtgctagaaccactttttgtcaagataaatattatcagcttttatcagcttttatcagcttttatcaagtaatttggaaagtgtatttcttacttcgcttttttccgcgggagtcccatttgacggtgcggccgtcatttaactggaacgtcttgccgccataagtggaattgagcaggaaggaaaagcgtttattggaagcttgggtgagcttatagcggggtatcttgctttcgtgtccatcttcgtccttttccgttacagatcaaggttgagttccgggtgtttgcgggtgcgcggtttgggggcgtcctgcttcttttttttgcgggatttcttttgagccttccggctggtccaagatacttgtgcaagcttgcgcagggcagtcttcccgtatttcccgataagagcttgcgcttgatcgggtgttaaggagtcaaggaaatcgttgcaggcgtgcgcccgcatggatgatgcggaaatggtatcactggtcaggagagcaaggtcagaatgcgacaagttttctacggattttggacagtagagtttggcaagcttgtaaacgttccgggtaacgcgttgcgggtgatgaccgttgcgaaaaaggatagtgaaaataccgataaggatatgcaaacgggcatccgctatttcttcttttaccacgtcaagttgatggtggtttagaccgcattcatagagtgcttttgagagttccgggaggatgggcgtggcgtcaaaaggcgcgctccattgctcctgtgtttctccgtgcgcatgcaacaggtagtcaagcgcgtctccttgagcgtggataacagaggggctggaactcataccgtacccccccttcccgggacaagacttgctccgaatgtggagctaaaaacaagaggtttactacgtttcttgctacgctaaaggcgtaaacgtttgaaagtaaacatggaggcgggagcgggaatcgaacccgcgaataacgattttgcagaccgtcgccttaccacttggctaccccgccgctgatgttgtgcgcggatactaggggaaagaaccgcgggtgtcaatctcgtttttggaaaagatgcgctgtttctgcggaaggctgtccgggaatccggccaccttccgcatggggcggcattgctttcaaggcgtcttcccgggagacggcggcgttgatgggcaagttcctggtttcctgcttttccgcatagtgaatgacaaggcggacgcgatcatatttttccgggaaagtgcaggtgaacgggtggaattcgatcggccccgaacggcatcgcgccatttctgttttcacggggatcctgtgtccctcccggtcaaggaataccatgccggcataggggaagctcacaggataaatgagcccgatgctccatgtgtgggtttccgtatacggattcacccttatgtccagatgcgggcatttttccagattggctacgtccgtaccttcctcaagaaaggaggagatgcagagagggatggaatatgcggcgttcggacggagatcgatttccgtttctggcagagtggccagccgcgcgcatttcaccggcacctttcccttgatctggattcttccgtcttgggggaaggggcggtccttaaccagaaggcccagggagaatatgcctttgcctgtttcctgttcataggaatgatgggaaatgctgatggacgtgtctttcagagaaattccatttccgcttctgatgctcagccctgttggattggcagctgcagagagtacggcgcggggggaagtgtaactgccggtgaataggaaataacggtatttcggaaagaagctggttagttgaagcttgatggcctttctgcagaatgtttcatgccgctccccccttgaaagggagggaatgagcaggaggaaaagggccggaagaagcttcatggatggctgatgaacgaaaagggggagggatacggaggcgcctcccgtgcaaagccggagccggaaagatagtttatggcggtttttaacggttggacagcagctgcttcatttccggaagacggaagtgcagcggaggaagctcctcctcaaacgcggctgatttttctttcctcagggcttccgcccgttcttccagtttccgggcttcagccaggattttgcgtatttcctgccgcccgcggcctatgtgggaaacggcccgggacgggtccggcgtgaattccggacctcccttgaggtatttttcaaagtattgctggtagcgttccgccagttcccgccctctggcaaagagcttgcggtcttcttccacataggccgccacggcggggtccacgtctttcgtgctcaggtccgccagttcttcgtcccgctcccgcagcaggtccgccgcgtccctgctgctttccgccaggccgggaagggtgggattctttttcagcttcaggaggcgctgcaccagcgcgtcgcttttttccgagtattccgtattgatgtccgccgcctttttccagtaggagacggtggggtcaccgcaggaggccatcaggaaggcggccagaaaggggagcgtgcggcgcaggaaagtaagggaagtcatgttccttttgtagcattcccgtgacaggaatcaaggctgttttacgggtccccggcttctgtttctcatgaaaatatgctgaatcttaatcggttccgtttctggaacgtttcttttccgccggaggcggcatttccaccacgccgctgctgtttccgggcgtcagcaggatttccacctccaggggcagggacgtatccgccagcagaccttccgggatggagatgccgatgggggcagagcttttgccgggcagcacttcctggggggagatgatgtccagaatgaggcgtccgtgctggagaatgttgattttgctgatggagaaggcatccttcatgcccgtgttatgcagcgtgacgcccttgagctgggatggggcgaacggtcccggaacggtgaagcgcaggatggtggattcccccctggcaagcggcaggggaagccagtacgccgcaatgggcgcctccgggttcaggctgtccgtcaggtaggcggatccgttgagacgttccatcatcaggccggaaagctccggggaggcgggcacgccccagccctgggaatacatgagggagagcaggtacagggcttcctggtcccggtactggaccgccattctcaggaaccgcgccgcctgggcgtaatcccgggaggccagagggggctgttgtggcaggcggggaaaataggaggggatgtccatgagcaggatgcccagctccttcatggcctcatagcatcctccggtggcggaacggtagagccattccaccccttcttccggcctggggccgccggggcagtcaggagacatgaggagtttccccaatacctgctgggccaccggatagccggttttggacagttgttccagagccgccagcatgtccggcgtggcgttcgccaggccgagaacgttcccgtgccccggggaaggcgtggtgactgccgccacgagccccttgtaggcagggtcatgcatcagggccggttccggcgccgcgggggcgatgatgaagcggattttagggaaggcctcctccgtgcgttccgtttcgcttttgaagcacgccatttgcatggggacggccttgtgggcggcggtttcaaaggcgtatgtgtaggcgcggtccgtggagagctccggcagggccgggaagaagaaggtggaggtggattgccccggcaccgtgaaggaggggacggagttgacggaacggtccaccagggctccgttggagtcccggatggtgaggtgcagttcctcccctccggtggccggagggataatctggaggtagatgcaggagatgcgcagcttttccggcaggatggaggggatgccggaacgggtcagaatcgtatcgtccaagcgcagctggaattccttcagcgtccgcggttccagcgccgcgtcttccgtcattctgagctccgggatgcggatggaagccaggtcccggggtgggggggccaattccttcccgttggcggcaggctgctggatggcctccttgatggtattgatggtggtgcccatgggggcctttttcaggtagtccatcaggtagaacgccgctgcgcccagcagcagggtgcagacgctccccaccatcaggaacatcatgtggcggttgcggcggagggtgcgcgcggacagcctgcgggaggcggaatgaagtccgcccggcccggcggtggcctttttgttcccggaattcttctccgcgcagggatgaggcattccttccggatgaatgtggcggatgtccgccggggatacctgaatggtggcggaggattcttccccggaaatggcgcaaatgtcgtgaatccattcacgggccgtctggtaacggcagctggtctggggagccagcgccttgtccagcgaaagcaggaactgccgcgagtaatagcgggtgagcacggggtcgctgtgcagcggcggcatgccgtcttccgccaggcgcacttccgcccgttccggcgggtggcccgtgagcagggcgtaaaaggtggcgcctacggaataaaggtcgctccaggggccgatgttcgttttccccagcgcctgttccggggaggaatacccctgggtagtcaggacggtggctgcatgcagcttcagggcatggcgcgccgcgccgaagtcgatcagcacgggcgtgccttcctccgtcagcaggatgttgccgggcttgatgtcacggtggtagatgtgcctggaatggaggtagtccagaatccgcagcaggcgcgtcagcaggcccttgagttcgtcctccgtgtagcggtgcccggtgctgtggagtttctcccccaggtagtccagggaaagcccggtgatgttctccatggcgaagtaggcggtgccgttggcttcaaaaacggacaggattctgacgatgccgggatggttgagctccgccagcgtctgggcctcgctcaggaaactcttcagggcccaggtgtaattttccaggtcgtgttcgttgttggggcggatgtgcccggtcagcgggtcccggtaggagcagctggagggaaagttttccttgatgaccacgttgcggttcaggaacaggtccttcgccagataggtgatgccgaagcccccgctgcccaggacgcggatgatttcatactgttccaggcgcgtgccgggggccagctccctctggtaaacgaaaaaggcgcctttttcttccgcgtgggggagaggggggcgtccgggcagaatctgttccaggcctgtcgttggagcgggaggcgggacttgccctgtcgtccggggctggtcgtctggctggccttcttctgctggcatgagggaaagttcctgaaacggaagctgcgggcattctcatatgccggatgcggcaagtcaaggtgaatgcctgttttcctccgtatcaggactgccgcctgtgcgtagtatctaaaacggcgcaagtggaatggaaggaataaacctaaagggagagatgaaggcgggggattctttctgccttgtccttcctgtacgccatgttcatgaagtccgttcccgtgaaagccgttccttcgcgttttcaggacttgtggcgcctgatgaattcccgtgcggctttcaggtaggcttccgccgccgtgccggaaggatcgtgttcaaagatggtgtggccgaagctgggcgcttccccgagccggatggagcggggaatgaccgtcttatacagcatctggggcaggtgctgttccacctggtcaatgacctggcgggaaaggttggtgcggccgtcgtacatggtcatcagcaccccttcatgcctgatgcggggattggctccgctggcgcagatctgcgccgtcacgtgcaggattttggccaatccttccagcccgaaccattcgcattgcaggggagtcagcacttcgtcgcaggcggccagggcggaggtcatcagaacgcccagggagggcggcgtatccatgatgcagtaatcataggcatccgactcccgcaggggagcgagcgtttcccggagccgggtcaggtggttgccggagcgggccagttctatttccacgccggccaggtccatggtggagggaatgatgtccagccgttttctgccggaaggcaggatgcactcttccgccggaagctggccgagcagggccgggtacaggctgggcatgtcttttccgtcaatgcccatgccgctggtggcattggcctgcggatccaggtcaatgaccaggattttcttcttcagctgggccagggcggcggccaggttgatggccgtggtggtttttcccactccccccttctggttggcgatggcgatgattttcattcgggaaaagggtgcggggaaaaggtagcataacgggaggccctttcaaccattttcccggagaggcggggcggcctgcgggctgcggcggccttttccccttccggaacggcctgttgcggggaatggcggagccgggaaagccgctgttccggaggctggagcccttggaatcagggtgccgtgggaacggcggggcggtcggaagacaggatgaggcggaagccgagcgcgtcatcccgcgtgttttccggcaggggggtgcggatggaggtggtgagctgcttggggcggaaggagaggtagctgcctccgcgtgccacgccgtagttgcggatagggagggactccggccccccgtaggaatcgtccacccattccatgacgttcccctccaggtcgtacaggcccaggtggttgggcgggaaggtcttcacaggggccgtgtacggctgtccgtcctcataccccacgatgacgcgggaggaaggaaggtaaatcagggcggactggtccgcaaaattgcccgttttatccggcggcggccaggaatacccccacgggaacacctcccgggagttttcatgaggcagcgtcttttcatagggggaggaccccttttcatccgtcaggcgcacccaggagctccattcctcgtccctgggcaggcggtaggaatcatgctggtcaatcagcccctgggcccgttccttgttggtaagccatttggcaaaggcgcgcgcgtcctgcctgcttacattaaccaccgggtggttctccccctgcgggaagccgggccgggccggggcttttctccccgtagctttcaggaactgctggaaatccttcacacgcacttcatgggacatgaccagggcgtttccccctaccggggccagctgcatgcccaggctgttggtccagggtgatccgaagatcacggatttgtccggctccagctggagggaaaggtataaatcctgcgggtccagcccccggcgccgcatggtggcgtgccccggcagtttgatttcaatcacgtagggcacctggttgacgtattcctcaatgggcgtgcggccgatcagcctgttgttgaagaagacgctggcgcccggcggattggtggtgacggtgatagggacctggaacacccgggtgacgttcaggacgtaggcgctgtggccgtctgcgctgccggacgtctgcggcagcgggtccgcattgatggaaaactccttgcccagcagtccctcccgttcgcatttcttattcagccacgccaggtaggccgtgatgccgtcctgcgtgagcagggccacgtccttttccggatggcccggttccgcctgctccctcttcatctggtagtttcccttctggtggtcctccttcaggaacttgttgaacagggcggcggtgagagggccttgcgctacatggcgcgtttccgcgggaatgtaggtgactccctccgtatccttccacggctggctgtccgtggggggatggtattccttcagcacgccgcccagggccagcgtggagccgcccttgacggttcccgcctcctccttgtccgcgaagcccgatttcttgatggtataggccacggaggaaccggagggcagttcaatggggccgtagggcgtttcatccaggtaattgccgtccgcatcataaacggacgctcccgccggggagctggtcaccagcacgtacccggtccgggactcctcctccggtgcggaggagtgggtttccgggcgcacgtccgcggcaggttcctccgcgggatgctggctattgttgagccacagggccccccagtaggcggtcagggctcccgcgacggcggcggccagcagctggagggtgcgcctgagcttgcggcgcttctttttcttctggaggcggaagcgggtaggcacttcatacccccgcagaacgtctattttctccgccagctcttccgcggaatcaatggcgcactcctccacgcggggttccgccgcctggcagatgatggtgttgaacgcctgccacttcttgcgcacggtgccttccggcagatcatccggaagcgcgggaaaatccatgcggtcctttcccgtgctgatttcatataaaaccttggccagcgcgtaaacgtccgcccgccgggtgccggggccgtccggggggatgaacccctccgtgcctacaaagctgcgctggtccagatgggccaccaggccgatgtccgccagcttgggccgtccgttgacgaagatgacgttcgccggcttgatgtcccggtgcgtcaggttcttgctgtgcaggtacagcagggcgtgggcaagctggctgcctacctccaggcagtaatccaggggcagcggcttgttgccggaaaacttcttgtccgtctggagcgtgcggggaatatactcgtccggcgtgatgtggaccccggtgcgggcgtcgtcgcccagctccatgacgtaatagtaaaacggggaatcctggtcgtgcctccccacgtgcaggatgtggaccagccccggatggttgcgggcgatgggctcatactgcaggatgccttcaaactcacggttgaacgtgcgctcatcctcaaaatcctcacgccagacgattttcacggcgcgccacgccccggtcagggacctggccagccagacctccccgtatgcgccgctgcctatctggcgcacgacctcgtggtccggaatggaaggagtgggacgcaccacccgtttgacgggcagcgtcggcagattgccgccgggcatgggtgatgcgtccgaagtcatggagggtacgggaatcaggaaataactcccaggttcttgcccaccttgcagaaggcttcaatcgccttgtccagctgttcgcgggtgtgggcggcggaaatctgcgtgcggatgcgggcctgccccttgggaacgacggggtagaagaagccgacggcgtacacgccttcgtccagaagctgggcggagaaattctgggacagcacggcgtcccccagcatcaccggggaaatggggtggtccttgccgccgatggtgaagcccgcatccgtcatggcgtcgcggaaatacttggtattcgcttccacgcggtcgcgcgcttccgtggactgttccagcaggtccagcaccttgatggaggcggccacgatggccggggccacgctgttggagaacaggtacgggcgcgccttctggcgcaggacgtccaccacttccttcgggccggaaacatagccgccggaagcgccccccagggccttgcccagggtgccggtagtgatgtctatgttgccgaacaggccgcggtattcgtgcgtgccgcggccccgcttgcccaggaagcccgtggcgtggcagtcgtcaaaatggacgatggcgttgtacctggcggccagctcgtgaatcttgtccagctgggcgatgatgccgtccatggaaaacacgccgtccgtggaaatcagcttcacgcgggctccggcggcatccgcttcctgaagcttggcttccaggtccgccatgtcgttgttggtgtagcggaagcgcttggccttgcagaggcgcacgccgtcaatgatggaagcgtggttcagggaatcggaaataatggcgtcgtccgcggtcaggaggccctcaaacaggccgccgttggcgtcaaagcaggaggggaacagaatcgtgtcttccgtgccgaggaactgggaaaggcgttcctcaagctggcggtgcagggtctgcgtgccgcagatgaaccgcacggaagccatgccgaagccccattcgtcaatggctttcttggcggcctccatcacttccggattattggccaggcccaggtaattattggcgcacatgttgatgacggagcgtccgtccttcagcgtcacctgggaatactgctgggaggcgatgaagcgttcttccttgtacagaccttccgcacgcagtccgtccagggtggaagtgaggatatttttgaattcgggggtatacatgtcgaataatggaatatgaattgaaatagccagcaagtggacgatcaaggatcacacggttgctcccgcacctttatcattattgagccgtgaagaaaagcttaaagaacacaaattgaaggccgggagaggacgggacggagaagcggaaactttccggtatcccatagtggcagggaaaaacggaagccggtcaaaggggtgcgtttcctgaagaaaaagaacaggaaaaatactcaccggtccggaatgcacgaacggcaggcagggacgggaagggaggagttctccggagtatgggaaatgcatttgatacacaaaacaggtgtcagagtgcgcttgaaaaagtgaaggccggttccaacctccggccattaaacccatcatacccgatcatgaaactatcccgtatttccttatggagcctgaccctggcaggatgcctgcctgccgtgcgcgccgaatcctggaaccagttcccggaaagcggtccggaaaccacgctggattccatgtgggcgtccgcggcctatgtgcagacgctggtggaagcctcctccgcccagataaatatctcccgtttccggcagaaggggccgtccaacctgtgggcgggcgccctgggcagctttggcgatgccggaatccggaacaaccagccttcctttgactactcagccgccggctacgcgctggggtatgactacggcacgtatggagaaaaatccggttccctgctgggtctggcgttcgggcagatgttcgggcaccagaacattcaggaaatgccggactatccggacggccccatggagggggaccgcttccggcagtctgcgtggatggccaacctgtacggcgccttcttccgggaaacggggccgcggtccagcctgcttcttgccgcgaatgcggccttcggcagtacggaaaacaaatgccgccacagtgatgcgtggggaaacgcctccaagtgggactcggaaacgttccaggcggggctttccgcctcctggcgctaccaggtgacgaactccttcagcgtgaccccctttatgggagtaacgtatgtgcacggagccaacaaggtgaaaagggatgaccggggcggctacggcgattcctcctggtggggggattactggtgggatgacgacgactgggacgacgatgatgattacaaccagcggcgggacaaccggggcacgtttgacaacgtgtccatggcgatgggagtgacgctggaacacgttctccgtctgtccggaaacaccgtatggatcaatgccctgtccgggagctactgcccggacatctaccgtaacgatccccattacacgttccgggacggctggtgggaaggggatgaataccgggaatcccggtacaaggggaagggttattctcccggaaagcagtcattcaaagtcaagctgctgtccagaatggtcttcaatgacagatgctccgtcttcgcctcctaccaggcgcacttcagggaatccttcctggagcaccaggcggcgctgggcgtctccgtctccttctgaacactggagccgccgggggaaagacgaatggaaaagagttcggctttcttccggatggctcagagggaaggggagggggaaagagcctggttttccgtgccggaatagtctccggttttcagggaaaactccagcatccggtctccctcaaacgtgaaaaacgcctcaaaccgttccccgtccagcatggcgggaagccagaaccggtcgtcctgccacatgagatcgtagggaatctcgtccaccgggcaccagaaaggctccgcctccggcgtttccgaaggggtgcccttgaaagaggacgccatgaacacgtggcagcggatttccggaatggtgccgcaggcgaaggaaaaattcagcacgcccatttcccgggcgtccgcaacgtcaatgcagagttcctcccggacctcccgcagcacacactggagggccgtttcccccggctcaaacttcccgccgggaccgttcaccttccccgcgccgatccccctcttcttgcgtatcaggagaatccttccgtcctgcaccacaaacatcagggtggcgaggatatcaggggtccactgggcgggccattgaaagccgctgcttctgtcttgcatgggcacatgttacaggatgggagggaaatcatgaagaaaaatgcgaaacaagcccggtagaggccggttccggcggaataggccgtaccggtaaggtagaaagcccatccgtgctgtgaatccaagagcatgggaacaaggtctccggatggaaccggacggggccgatcttattcagtccgttccttccagcaggtcctctttccggacgcgggaacccgcgagggcataggcgagcatgaccagctcacagaggaagacgagcatccatgaccagcgccagcttcccagtgcgtccgtcagagctccctggaggaaggggaaaacggcgccgccgaacacgcccatcatgaaaatgccggaagccttggcggtgtattttttcagtcccacggtggcgagcgtgaaaatacagccccacatgacggaatggaacagacccacggaaaccagcacccacaggttatgggtgtaaatggcgaccagcgtcaggatggccgccgcggaggttgccgccgtcaactggacgcggggggagatatggttcagccagctggaaacgatgcgccccaccatcaggccgccccagtacagggaggccagcagggccggaatgcccaggtccaccccccacaccaccaggttgctggagcccaggaacagcagcggttcatccgaattgctgagttccagggcatgcaggttcacgttgatgcccacggatacctccgcgcccacataaaagaaaatggcgatgacgcccaatgtcaaatgccggaaggaccagatgctgcgttccagcttttctccttctccggccgtggtgtcccggatgttgggcaggtaaaggcgcttcgtcatcagggtgaccagcgcaatgaggacgcccaggataagcaggggaagcatcaattgccgcacgtggacgctctccatgggcagtccggcaaacaggatgccggtcacgaaaaacggcgcgatcgtcgttccgaaggaattcacggcgcagacgatgttgaggcgctggacgggctgggttcccttcaattcataggacgtcacgtaggggttgatgacgacctgtaaaaccgtggcggaggtgcccatggcataggaacccgccaagaaaataaaatagccgtaggggatgctggccccggcgatcgtcgtgcgcaggtccccgaactggacggtgaaccatgcagacaggaaaaagacggccagcccaagcaccatgaacaggagcccccgtatcagtgtggtcttgtagccgtagcggttgatccagcaggaagcgatgtttccgttcaccaggtacgccaggaaaaagaaaaagggaatcagcgtgatgaacgtgtttttcaaggagccggcgtccgacaggaaggcgctttgcaaaggcccctggaactggccgttcacggtggacaggaacccgacaaggaaataaatgaaggtcagggcaaggaaggggcccaggcgtgaatgaggttgtgtttccatggggagggtgagaggtgaaaatgcagaaaaaggaagaggccggaaaggctccttcaagccgcccggaaccgggtccggacggcatgaaggattgtatgactacggaagaaccaattgttccagaacggggagcacgtcgtctttttcaagcttctccaccatgcccaggtactggctgacgaacttgtccgccgccttcaaatccgtgctccggaagggggagagggagaggaaatccagagggtcgccgctggcgatcaatttgcggtcctccttggtcagccagggctcgttcacttcataagcctggccccggtcgtccttcccgtgcttcaggtaatggcggtaggcggccacgaaaaacgccaggcgttccaggtcggcgccgtccctgatcatcttcgttaaaacgggcatcacatacacgggaatcttggaaacgccgtcaaagcacaggcggctgatctggtcgctcaccgccttgttgccgaagcgttccagcagggtcttcttgtacagctccaaatccgtattccccggaggcggaacgtaggggcccgcgtcccggtccatgaaaaggcgcaggtagcgggcaaaccgttcatcccctaccgcctcgtccacccggcggtacccggccagaaaggcggggtaggacagcagggagtgggaggcgttcagcaggctgagcttcatattctcataagcggaaacgtcgtccgtaaactccacgcccacggcttcccagtccgggcgcccggcaaggaaatcatcctcaatcacccactggatgaaatcctccgaataaacgggggcggcgtcttccacgccgctctgcgcgtccagccgtttgacgtcctccggcgtgacggcgggcgtgatgcggtccaccatgctgttggggaacgtcacgttcttcttcacccactgtgccagtccggggtcctgggcctcgataaaggaagtgaacgccttccgggccgtgtctccattgtgctggaggttgtcgcaggatagaacggttacggggcctgcgccgtcattgctcctcttccgcaatccggcggccagaaagccgaaaaccgtacggggatggccggggtgttccaggtcatgtttcacgtccttgctgttgagcatgaactctccggtttccttatccagattgtatcccccttccgtaatggtcagcgtgatgattttagtgcgggggtccgcaattctgtcgatgaccttttcgggatccttcggcccccacgccagatccaccagggagcctatctcataaaactcgtccttgccgtcgcggccgcagaccgtcagcgtgtaaaggccgtcctggctcttcagcgccttgtaaaggggctcgtcctgaggcagcagcgccactccggaaattccccattcgtcacggccgcccatgcccagaagctggttcgtgtaaaactcttcatgcgcgcgatggaagttgcccactcctatatggactatccccggctgaatggttgtcctgtcataggggacgggagcccccggaatcttcgccttgccctgtcgtttcagttccttcttcatcatcttgaaatgaggtatggtatttgccgtctcatactaatgggcatttccggagaggcgggtgttagggatatgccagactttttccctatccggcggattgatcacgcgccgcgggggaccgttcacggaaaaatcccggatttttttacgggcacggtttccacagggcgcgatgggaccccggcagtacgtcctttgccggcatgactggaatgaacctctttttcctttcccggaacaggcggcgcgttctatgctttactatctctcccggctttcctttatgccggaaggaccaccttcaacatttggaaaagcatgtatgacgtcgtagccctcggagaactgctggtggacttcaccccctgcggagtgagcgcccaggaactgcccgtttaccaggctaatccggggggagccccctgcaatgtcctctccatgctgtcccgactggggcgcaggaccgccttcatcggcaaggtggggcatgacatgttcgggaaaatgctccggcgcacgcttcaggaggaaggcattgacgactcagggctggtctcttcccgggaagtcaacaccaccctggccttcgtccagattgacgaacatggcgaccgtgatttttccttctaccgcaatcccggcgcggacatgaaactgacctccggagaggtggacatggcgctggtggaaaacacgcgcgtattccacttcgggaccatctccatgacgcacgacgacgtgcggcgcgccacgaggcacgccgtcagccatgcccgggagaagggtgccctcgtctcctttgaccccaacctccggcctcccctctggcccagcctggagctggcacgggagcaaatgcgctacggctgcggcttgtgcagcgtcatgaaaatagaggtggaggaacttctgttcctcaccggttgcgcctccatgaaagaagggctggatgccctgaaaagggaattcggcaatctccgcctcatcctcgtgacagggggcagggaaggaagctgggcttcctatggagacacgctggtttaccagcctacgttcctgaaggtcaataccattgacacgacgggcgccggagacgccttttttggttcctgcctggactggattctggaaacagggctggaaaacctgacggagggacagttggcggacatgcttttattcgccaacgccgccgcgtccatcgtgacgacgcgcaagggagccatccgctccatgccgaaccgcgtggaagtcctggccctgatggcaggtggcgtttgaagggcatcgtaaatacacaacttccctcattggtttttacctgaactgtttccagcgagtaaacaagagggaggacctttcatttcttgcagcacattcccgtttcgtgtcgataaaagttgtataaatatactgcggtttgtcttgcaattgtcgataaacaaaaaccgcaagcgcttatgaacagcaacttgcggtataaaagtgatggtgctcgagaggggactcgaacccctacgtcttatcgacactagatccttagtctagcgcgtctaccaattccgccacccgagcatgggtgccttaaggcggggagtttttagcgcagaggaacgaagatatcaagctttttcttcttttttatcctttcgattccgttttttgaagagggattttcttagcggaccgggagggaggtagccacgggcatgatggccgggcgcagggtgacggccttggtgtcatatttttccgagggtttgaagagccagccgggatcggtgctgacagcttcaaacctggtcggcttgaagatgggcagcctcaggttggagttgggctcgtagccgtatttgcccgtgtacttgccgtagaccctgtattcatagttgttgtcataggcgtagcgcgggctcccggcgtattccggcaggcggtccggagtccggcaggagctttcatccatgatgacgagctgggccgttctccaggtctggcccggctggcgcaggtacccccagaaacgcgttgccggcacatggtaacggcggccgacgaagtagttgcccctgggttcgcgggcgatttccgcattgcgggcgttgatgccggcgatgtctttttccagggagttgcactgggtcaatgcgggaaggaggacggcccccagcaggggaagcaggagtttgttcatggctgtgatggtgtttttttcttgtttaagagcgtttgaatggcggcggaagccgcgaagaagccgaaggtgcccgtgatgtgggtgatggagccgaatccggagtcacagcccattttcccctggaattccgggtcgcgcgtgcaggaggtttctccgtcgcaggtggggtagacgggagtttcctgggagaagacgcaggggattttcagtttccgggctttttcccccagcggtaggccatagtcttttttgagcttgtagcgcaggctggagagcagggggtctcccttggtgcgggagaggtcgcctatttctattttggcggggttgacgcgtcctcccgcgccgccgcaggtgaccagcggctgtttgctacggtagcaggaggcaataagatgggccttgggaatcagggagtcaatggcgtcaatgatgacgtccggtttcgtctccagcagtttttccgcattggaggccgtgtagaagctgttgatggagatgatttccgactccgggttgatttgccggaggcgggcggccatggcttccgtcttggactggccgatcgtggtttccagagcgtggatttgccggttggtattggtgatgcagaggtcgtccaggtccatcaggataatggcgccgacgcccgaccgcgccagggcttccgccgcccaggagcctacgccgccaatgccgacgacggccatgcgggagttcctgaggatgtccagcccgctccttccatacaggcggcctatgccgccgaatctggcttcatagttcatggctgcgtgtttgaaccggagtggggaattaaggagaagacgggtgccagagggcccttccgtttttccatcgtgaagatataatagcggggggaagccgtttgttccgggcggcaggaggcgggaaggcctgcgccccggttccagcagatgaggcaggtgtttccatgcacagcaatcagcatgtcccatccacccccgttttgctgagggatgccgtcttttttatcctggtagcgtacgatgccgtcctgccggacggtaaagaggaccatgcgtccgcaggagggcatggcgatggcagccgtatttctgcatgctacggccagttttccgttgttccaggagagggtgacgggctgccggttaccccgcttttccgtgagggtgagtgagggatgctgccggagcaggctgtactggagcgccggctgtccgtccggtgtgaggaagcaggatgcgggaagccgatgccagccttccctgtgggccatgttttggtagtccctcacggcgtttccgttgtgtccggaacatccgcagagcgccgtcaacaggcatgataagaggaaggcggtggcagtctgcatggtcaggaggccggtttttccacgattttgctgatgcgggcgatgttgagggccctcccggtggcttcatccacctgcacgacggctccgcagaggcgcacgggccagttcgccacagggaatttggccggcatggaggtgcggaagcgttggataatgggttcccgttcccggcccagcaccccgacggcggggccgcacatgccggcgtccgtcaggtaggcggtgccgtgttccagaatggtttcatccgccgtctgcacgtgggtgtgcgttccgatgacggcggagaccagtccgtccaaattgtagccggtggagattttttcactggtggtttccgcgtgcatgtccacaaagatgacctgcacgccttcttcctccctgagtcttttggcttccgcttccgagatgaggaaggggttttcaagcggcggctggatgaaggaacgtccctgcacctgcatgacggctatttttcccctgagcgtttccaccaccacgcttccgtgtcccggtgtcccctgcgggtagttgacggggcgcagcacgcgcggttcggagtccagccaaggagccagttccgcctggtcccatacatggtcccccgtcgtgatgacgtccacccccgcatgcagcagttcctgcgccagacggggcgtaatgccgcgccctgcggccgcgttttcaccgttgacgatgacaaagtccgccccatgctcctttttgagttccggcagcatgtgcttcacggcggtgcggccaggttcgccgaccacatcgcctataaagagtatggtaatcatgaaatgggacgggactggtgcggatggcggtttttactgctcttccttggtgacgggaaccaccagcacgggcacgggggatttccgcatgacggagctggctacgctgcccagaaagacggtggaaaggaagccgtggttgtgcttgcccaccacgatcatgtcaatgtggtgtttttcagcatagttgatgaccgcttcgctgatttcaaattcgtcttccacagactggatgatggttgcgtccgtcagccgggagagtttttccgccgttttttgcagatggttttttgcgatggagatgacttcgttttcttccgtctggtccatcacgggcacaggcacttcatccggcagcacgccggagacttcataacagatgctgggttccacaatgtggagcagatggatgatgctgtcgttggggcaagccagtttgccgatctgatgaatgacggcgtccgtggcgttggagaaatcaatggctaccagaatattcttcatatcttcctgtataacattccgtgcttttccatgccactaaaaaacgtgtgctgtccccggttctcccggcattccattcccggttcagatcaggcccacggcccggcgcaccctgtccagcactacggaggccgtttcccgcgccttgcgggccccttcttccagcgtccggtgcacgtagtcctggttggcttccagttccgccctgcgttcgcgcgcgggacggaagtattcccagtaggcgtcaaagaggcgttttttgaagtcgccatagccgcagcctccgtttttgaagtcgcggaccatgtcttcatagccttccgcagaggcgaagagcttgtagagctgcaggatgacggagccttccgtgggtttgggatcttccacaggggtggagtccgtggggattttcatgatgagcttgcggacggctttttcctcaccgaagatggggagcgtgttgttgtagcttttgctcattttttgcccgtccagccccggcacgatggccgtgctttccgcaatgagcgcatccggcagcttgcaggtgccttcgccgaattgttcgttcattttgcctgccaggtcgcgggtgacttccaggtgttgcttctggtccttgcctacgggcaccaggtcggagtcatacatcaggatgtccgccgccatgaggacggggtaggtgaagagggcgttgctgggggagaaccccttggcgattttgtccttgtaggagtggcagcgttccagcaggcccaccgggcagacggtgccgagtatccaggccagttcattgacttccggcacggaggactggcggaagaagacgcattttccagggtccaggcccacggccagaaagtccgtcgccaggtttttgcagttttcccgcagggtctccgcgtcgtgaacggtgctcatggcgtggtagtccgccagaaagtagtaggattctccgcgttcctgcatgcggacggctggttccatggctccgaagtagttgccgacatgcagcttgccgctgggttgaagtcctgtgatgatacgcattgcgcgcaggattttgcctgttcgcgcccggcaagtcaagaaaggggagagtcaaagactggcggggaggctggccgggcgcctcgcctgttccggtatgcgtcctgcgtttgttctctctctttttcatgcctgcccggagcgttttcttgggcatgaagagaagaagcggcggcgggagtttattctccccccgcttccagcgcttccagcacgttgtgcacgccgtccgcaaagcttgggtagagcggctcccagcccagggccagaaggcgggagcaggagattctctggctggaaaagccgcggcgcgcttctgcctggagcggttcgggctgtggcgcgggcatgcccagcagtccggagaggtaggagtaaatttctcccagctgcatgggggtgcggtccgtcaggttgtagatgccggtgggcggttcccggagcgtgcagagcaggtgcagggcggccacggcgtcatcccggtggatgtagttgatccacctgtccatgtttccggggagggccgcgcccttcttgcagtattgggagacgagcacgcagcggtccggcccgtaaagagctcccagccggacgacggtgcctcccgcggccagaaccgcctgttccgcctgaatgaggaggccgctttttccggaggcggggtagacgttatgttcctccgtgatccagcgtccgtccgtgatgccatagacggaggtgctggagcagaagatgaccggcgttccggggaaggcttccagcgtgttctgcgttccgcggatgtagaggctgcggtaggcttcctctgagcctccccgcgtgctggcgcacatgacgatgatgtggggggaggggatgcgggcggccaggctgtgcatggaggctcccttcgtgacgtccgcctcataaatggctttctgtgcgtcaatgtccgccgtaagggccgtgtgaccggctttccgcaggctctccgccagcgcttttcccaggtagcccgttcccagaatgaggacggcgcggggttctgtacacagaaggccggtcatgagtctttgcggaggtgtttgagttccaacagcgtttcagcccgggagacatcttccggccaggtgattttgggatttggctcatggttgtgcaccagccgcgtgggatggccgatgagctgcagggcggttacttcatccgtcacctgcatgttccgttccgtgacttccacatacgcatccagcaggagcgggtattggaagacctgcggggtttccatgcaccacaggccgtcccggtccacctgctccggcagggtgaagcgttcttcgtccgcgcgcttcaaggtgtccgtcacgggatgcgcggaagcggccgctccgcattccctggcagtctggatgcagcgggagatttgctctaccgtgataagggggcgcgctccgtcgtgcacggccacaagttccggcgtgtagagaagggctgccaggccgttctgaacggattcatgccgttccgctcctccgtccacgcgggtgacgggtatttccgtctccaggtccgcagcatcaatggcgcggaagcgctcttccgggcagacgaccacgatttccgtgatttcccggcagttggcaaaggcccggatgctgcgttccagcaccttgacgccgtgcaggggggccagcagcttgtcaaatccggcgcgccgggaggacccggccgctacaatgatggcggcgcagcatttcatgatagtctggctgacaccatgcgggccagttccttgccgttgaccctgccggcggtgcgttcctgcatgagtttcatgacctgtcccatgtcttttttggtggaggctcccgtttccttcaggacggcttccagcatggcctccgtttcctctgcggtgagttcagcaggcatgaattgcttgaggacggcgatttccgcttcttccttgtcggccagttccgggcgtccggcggagcggaattgttccgtagagtcttcgcgctgcttgatttgcttgcggaccacggccagttcttccgcttcctccaactgggttcccaggcctcccttggcgatggccgtgttcgtcagagccgtcttgagggcgcgcagcgtgttgagggtgacggagtcttttgctctcatggcggttttcatcccttccatgatttggtctgaaatcttgctcatatccccattaactaagcgcatccccacgtgtacttcaagccgtaaattgaaaaaggccgccagcgcgggaaatgcccgctggcggcccggagaggggagttgaagagcggaaccgcccggtttattttttcccgccgatgggcatgatgtggattttcttttccgccatgcccggaaccacgatcatggagtcatacaggataaagtccgccgcgccttcaatgggaccggtggctgccggcgcggaacgccccgttttcaggtccagcctgcggatggcttccggttttttgtccttggaccagtcgctgtagtaaagggcgttgtcacggtacaccaggccgtcgtattgcccccgttccttggagagttccgtgacttcccgggagacggggttgatggagagcaggcggccgctgggcttgcctttttcatccgtggcgtattcgcagaggtagatgacttttctttccgggtcccaggccaggccgttcggcttgtagatgggctgcttggtgaccagctccccgtaggaactggtgttcgtatccacgtagaaaatctggtcggtatccgtggaggagaccatgagcctgccgttgatgaacgccaggtcgttgaggaatttcatgcgggagggggacaggtccacatacccctcaatggtgccggttttggcgtctatcttgtagaccatgtccacatccgtgcagtacaggaagccgtcctggtacaggagccccttgggagcgtccagggtgtccacgtccgtgatctttttaggttccgtggagccgtgcgggataacgcccaggtagccgtccttgtccttttccgtgggcgccagtttggcgccgatgcaggtgaagtagatgttgccctccgcgtccgcagccacgctttccgggtggccgtcaatggcaatggtggctttttccagcggaggcagcggtttggccggctccggctgttttttggttggaggagctgccagcgcgctgcacgccaggcagagaaggagtagtgttgctttcatggggttgtacggtgtaaaaggcttggaatttatggcacggaagcaggagaaaagcaagccgtaggagctgccctgcggacgccgtgcggaggtgcgccccgttcgcgcatgcgtaccggggcgcaccgggtcagatggctcctgcgtccagattgttgggctggggcatgttttccatgcggatggaacggttgaccgcgttcaggtaggcccgggcggaggcttcaatgacgtccgtggatgctcccttgcccacgatgggcttgggctggccgaagtccacgtgcaccgtgacttcccccagggcgtccttcccttcggaagcggcgttgacgctgtagcctttcagcgtgcctttgcgcttggtgatgcgttcaatggccttgatgacggcgtccaccgctccgtttcccgtggagctgtcttcaaattttttgccttccttgagcagtcctaccgtagccgtgggccgggcgtggctgcctgccacgaattgcaggaagtccagctcccacaggccggaggaggcgtgcagggagtcgtccacaatagcggacaggtcatcgtcataaacgaatttcttggagtctcccactttcttgaagcgctcaaagacggcgtttacttcctcttccgtgagcacatgtcccagttgttccagcctggccttgacggcggcgcggccagagtgcttggtgagcgggagttccgtggctccccacccgaccgcctgcggatccatgacttcataggtttcccggcagttgagaatgccgtgctggtggatgccggaggagtgggcgaaggcgttttcccccacaatggccttggaacgctgcacctgcatgccgctcatgcgggccacaatgcgggaggtgcggacgatttcacgcgtgttgatgttgtccgtgacgtccccaaattgcccggcgcgggtgcgcagggccatgatgacttcttccagggccacgttcccggcgcgttcgccaatgccgttgatggtgccttccacctgccgggctccggcgcggacggcggccagggagttggctacggccaggcccaggtcgttgtggcagtggacggagatgacggctttgccgatgttcggcacgttttccttgaggtggcggatgatgcggtagaattcgtccggcgtggtgtagcccacggtgtccggaatgttgacggtggtggctccggcgtcaatgacggtttccaccaccttggtcagaaagtccaggtccgtgcgggaggcgtcttccggggagaattccacgtcctgcacgaattgtctggcgtaggagacgccttccgcggccatgcgcaggatttccgtttccgcctttttcagcttgaactgcatgtgcagcttgctggtggccagaaagatgtggatgcgggcgcggtccccggcgggttccagggccctggcggctgcttcaatgtccgccttcacgcagcgggccagtccggcgatgcggcattttttgatttcactggcgatggtatgcacggcttcaaagtcgccgtcggaaatgcaggggaagccggcttcgatcacgtccatgcccagccgttccatttgacgcgccacttccagcttttcgcgtaggttcatggatgctccggggcattgttctccatcgcgcagggtagtgtcaaaaaagtatatttggtcggacatgggttgatgatattaagtcccggtataataatgttttgctccggcaacgcaagccctacgcgctgcatgccctcacggaggggggaatgaacagggcgtaaggccgctgcgggtgaagaatgacggaaccgttctttgcctgaaaatggaaaagctgtaggatgagagggtgaaaatcagattttacctgaatgaccaggcggaacgcatcatggccctgtggagtgaaagccgcggggagtacctggtggcggattccgtgtttgcggaggtggatgcctgcatttgcggggaaacggattccagcggagaggagatgaagcgcatcgctgcgtttctggataatccagccgccaaggctgtagatcctgactggatgattgataccgcgctgccctgttccccctccaagctggtgtgcctgggaaagagctatgcggaccacgcgaaggagtttgacggcgatcccgtgcaggagccggccattttcctgaagtccccttccgccattacctcctgcagcgacgtcgttttatacccgcccgggtgtgacaagctggattatgagattgaactggccgtggtgatcaagaatgtgctgaagaacgcttctccggaggaagctgcgctggccatcagcggctataccctgatgtgcgattattcggaaagggccaaccagctggaacatggcggccagtggaccaaggggaagagctacgacagctttgctccgatgggccccacttttatttccgcggaggaactgggggacggctccggtattccgcttgaattgaaggtgaacggggaagttcgccagcagggcaatacggacggcctgatctggcccgttcctcgcctgattgcctatatttcccgtttcatgaccctgtggccgggagacgtggtttccaccggcactccgggaggcgtgggcatgggaatgaatcctccgggttatttgaagcccggggacgtggtgaagtggggaagccccgctttcggctatgcctcccaggctgtggtgattgatgacgaggagtaggccggacgttcaagcctttcaggaagtggagaagggaaaggtttctccgcgcgtggactgtgttttctcctgtcgccggagcatcgtttttccggaggacggtcccgccggtgtggagtgggcagcaaatactggcggcatccggaagaaaggcattgttttctcttgattcctccgccatggtttagtgaagtggatgcgtgaaaaacgtggttctgtacgtggtgatggtgaccgggctgacggccctcttcgtctggctgaaggggaggaacacggaacgtgctccggcttcctccgccatggtggtgtctccggaggatgacgccgcgcacgatgtcgtgctggtggatgtccgtaccccggaggaataccgcgcaggccacaaggagggagccttgaatattccggtggatgaggtggagcagctggctcctcaactgcttccggacaagaatgccgtaattctgttatattgccggacgggcaagagggcggacaaggcgatggaaaccctcaggaaaatggggtattcccatttggagaacctgcaccggtttgagatgtagccctcggcccgttttgccggtgcgcggagtccggaatgcgtacggccatgccggttccggtttgcggagcattgtttgatgtaaaaagcacaggccatgaaatccatccatgcctgtcctgtaaataaatcaagctccggacgccctgtagaagaacggccggagcttgatgaaaatgaggcagggtttatgcccgtttgcggcgcatcagcagagcgcccaggcccagcagtccgaggctggccgtggccggttccggaacggaggccagcgccagggcattgatgctgccgcttccgccctgggactggatattgagctgggttccgtcggcagccacgtcgaatgtataggtcactaccatccagtctccggtatgcgtgttgcccgtgacggtggcgccgttcaacgtagcgccggacccggtggagtagtcgtccaggctggcggaaatgttggagattccggtgccgtccaggctgaaggaagaagtgttgcccgcaccgtagttgtttccgcgtcccaccagcatggtcagcgtgtaggtgccggcggacaggttgttcagggacatcgtgaagttgccgttggcactgtttccattgatgacgccgcccatcgggttgccggtggtcatatcctggccgaaaacatcgtaaaacttgttgccctggcccagggcggagtctttggcggaaccatccgtcagaacgcctccgctcccgcagcagacgccgccggtcgtcagggtgatgccggtagcgtcgcctccgctggtcaccagtgttccggaagtgtaggaagaggagctgcccgtggagattttgttcacttgttgtccggattcccccagatacgtgccgtccacaacggaggtgccattgcccgaattgatcccgaacgagatcagaacggtggaggcttcagccgcaaccgccgctgccgccatggttgccagaatgaataatgtcttcttcatgctatcaatgagatacgtgattggaaatgatagaacacccttcctaggagtagataaatagcgaatttataatccggagtcaagcttcagttctaaaagcaagtcacttgtgttaaacggtcgtttcattacttaaactttttccggaaggaaatgttgttttgattggcacaaccgtgcaggagcaccgcatgccgttgcggcaaccggaattcatacatccgccaggaagtacttgcttttaagaagtaaagttcgctgacgctcaagttcctattcaaatgccgcagcggcctgcggctctgctgacgcggtcaaatattttccattttttccatggaatggccgttccggaattgaagatgggcacagggtgtattcccttcattcgcttttaattcataacggattataaatccgtgacgtttaaaaatcaaaatcaagatttattcaataagtaaaaaggcttttatcccagccttggaaagtgctgttccaccgttgccggataagattgttttttcccggcaatcctggacaatgccgcccgggcaggaaccgttcctctccctttcctgacggcaagcccatagaagggagcgggatgaagattcctcccgttccggcgggacggcattcccttcaaagaagaaaaccctccgcatggagtcatgcggagggttcctgtttaattgttgtccgtaaggttattccgcctttggcttgcggggagtccttttacggggagttttggttttcggagccgccttgtccttgacgtgcaggaaggtgagcgtttccgttccgtccgtttccacggcttcaatcttgtcgccgggtttcacgtctcccctcagcagggattccgccagggggtcttccagcagccgttcgatggcgcggcgcatcgggcgagcgccgtactgcggatcgtagccgtttttgatgatcaggctcagggcttccgggctcaggaccagcgtgatgttcttggtcttgaggcgggagatgagcttgtccgcttccagctgtacgatgcgttccaggtcgtcccgttccagcatgcggaagacggagatgtcatcaaagcggttcaggaattccgggcggaattgcttgcgcgccgcttccagaatcttttccttcatggcggcgtagtccgcattgtcggcagacatggctccgaagcccatggcgctctgccgcttggcggaggcggcccccacgttggaggtcaggatgatgatggtgttgcggaagttgatcttgcgtcccagggagtccgtcacgctgccttcctccagaatctggagaagcaggttcatgacgtccgggtgggccttttccacttcgtcaaagaggataacggagtagggcctgcgccggacggcttcggtgagctggccgccttcgtcatggcctacgtagccgggaggcgagccgatgaggcgggacgtggtgtgtttttccatgtactcgctcatgtccacctggatcagggcgtccgcggtgccgaacatgatttccgccaggttgcgggccaggtaggttttgcccaccccggtggggcccaggaagaggaaggagccgatcgggcggcgcgggtctttgatgtccgcgcggctgcgccgcagggcgcgggcgatggcggaggccgcctcgtcctggccgatgaccttgcttttcagttcttcctccatgcgcaggagcttggtggtttccttttcctccatccgggccagcggaatgccggtccatttggcgagcacgctcatcacgtcttcatccgtcacggggacgtagttggtctcgtaggagttgcgccaggtgtccagcatgttctggagttccgccttggcctgtttttcctcgtcgcggaggcgggcggcttcctcaaagagctggccgtccacggccttgtccttgcgttccttgatttcctcaatgcggacttccatctcgctgatgtggtccgggcgggtcatctgggagacgcgcttgcgcgctcccgcttcatccaggatgtcgatggccttgtccggcaggaagcggcccgtcagatagcggtgggagagcttggctgcggcttccacggcctctttcgtataatgaaccttgtggtgttcctcatacttgggctggatgccggccagaatctggatggtatcctccacggagggttcccccacctgcacctgctggaagcggcgttccagggcggcgtccttctcaatgtgctttctgtactcattgagcgtggtggcgcctatggcctggagctccccgcgggagagggcgggcttgatgatgttggaggcgtccatggagccttccgcggagcccgcgcccacgatggtgtgcagctcgtcaatgaagaggatgacgttgccttcccggcgtatttcatccatcacggccttgagccgttcttcaaactggccgcggtacttggtgcccgccaccatcagagccaggtccagggagatgactctcttgctgcgcaggagttccggaacgtggccctgggctatttcctgggccagcccttccacgatggcggtcttgcccaccccggcttcaccgagcaggacggggttgttcttgttcctgcggcacaggatctggatgacgcgctcaatttcggaggcacggccgatcacggggtccagcttgccgtcccgggccagctgggtcatgtcccggccgaaggcctggagagcgggagtcttggatttctgctgccgggagtagggggggaggaaggttcgtccgtcgggatggcgggggattcgttttcctcctcgtcgtcatcgtcgtccgggatgatgttgtcttcatccgcatccatctggtatttgggcgtcagtacgtccagcagctcgcgccgcgcctgttccaggtccacgccgaagtggcgcagaatctggccggccacgccgtcgccgtcccggatgaggcccaggagcaggtgctccgtgcccacatacgtgtggttgagttcctgggcttcccggttggccatcgccaggaccttgcggactctgggggtgtacgggatgttgccctccgcctggggctccgtgccccggcctatttgttcctccacctgcctgcgcacggcggtaagctccacccccaggttttccaggatggtgacggctacgcccttgcccagcttgagcagcccgaggagcaggtgttcggtccctatgtaatgatgattgaagcggtccgcttcccggcgtgcatgcgccagcacttgttgcgccctaggcgtaaagttgttcatgtattgtaaagaagttttgttgttgcatcagtttccggaaagttccttccggataatgtccgcacggatctggtccctgtcttcgggagttgtctggtccgtagtggacaggcgggccaggtgggccggctgaatgttcagtatggttttattgacgttttttaatgcctggtgggaaaagatgtccagggatgctcccatccggaggaaggagagcagcgccagcgcctcctgcgtggatagcagggtggcgttggtcaggaggccgtaggcgcgggaaacgcggtcttttacctggagcgaggaagcctggagcagccgcctgcgggcgttccattcctggtgggccaggtcggaggtgaagcgggtcatgcgttccacgatctggtcctcgctgtctcccagcgtggtctggttggaaatctggaagaggttgccggtggcttccgtcccttctccgtacaggccgcggacagtgatgttgagctgcacggccgcctggacgacctgttgcatctgttcggagatgacgaggcccggcaggtgcatcatcacggaggccctcatgcccgtgcccaggttggtggggcaggcggtgaggtagcccagccgcgtgttgtaggcgtacgggagcctggcttccagttcggagtctattttggagatggctccccatgcttttttaagctggatgccgggcaggatgtactgaaggcgcaggtggtcctcctcattgaagaggatgctggcgttctggctgcgtgagatgagaacggcgcagccttccgagcgcgcggccagttcccgggaaatgaggtggcgttccaccagcagctgtttctgctgctgggtgagtccggagagttccgcgtaatagcctcccttcatgacggggatttggcgcgcttcaccggaggtgagcttcagcgtttcctccctctgctggcgcgtggcccagccgggaaaaggggtggcggtcagattgcgtgccaggcggatgcgggaggtgagaacgatgtcgtgttcatcccgtgattccaccatccatttggcggggttgtttagtaagtcgtcaaagagcatgtacgttaattggtcggcgtgcgcaattgcttgatttgatcgcggagcttggccgcgcgttcataatcctctcttgccactgccagggaaagttgttgttccagatcactgatggtatgggtttccgtttcgcgcttttccgcccgttcgggcgttttcccgtgatggtgggaatcaggctggatctgggtaagaagagggaggatttcttcttcaaagacgttgtagcattcactgcagcccaggcgtcctacatttttgtaatcctgaagggtgaaggagcagatcgggcagcttgtgagcggtagggactgcagggccggaatgggggcggcggggtccgccgcgccttccttgccgaactggccctgaaggttcgggaacagtttctccgccagatcaaaggcgtccgggtccagcaggccccgctcctgggcgcatttggcgcagaggcagaatttggtggatttcccgttgatgatctgtgtcaggaacaccgttgccggtgcagagcatatctcacattttttcacaacccgcattataatggcgacccccacggcggactagtagtctgcgtgtcatggattgtcatgaaaacgggccttgttattgtacggaggaagaattctttctgcgctgttttagaagcccgcaccgtgatgaatacaagtaggctgcgcagaagaaggttcccagcaccagaatgatggttgcgcccaggtgccagcccagcggaaaggacaggtaaaaggccagcagggagcccagtccgccgatgattccgcccccccagaagaggtgggaaggcttgttggtgagcatgtacaccgtggcggccggaccgacgagaagccccagcgtcaggaacgcccccacggcctggagggaagagacgagcaccaggatgatgagggtgaagatgccgtagctgatgaggcgggaagggatgcccagcgtggtggcgatgtccgggtcaaagaggtagatcaggatggggcggcggaagagcagcaggatcaggacgctgacggaactgatggcgaaggcgatccacaggtcggagtcggacaggctcatgatggagccgaacagccagtcgtcaattttctgctgcaggcccagccgcaccagtacgatgaaacccgcggcgaaggccgtggtgtgcaggatggacagggcggtatcctggttcagccgggacgtgcgggagacgaatagggaacccaggcccaccagcagggcggccaccacggcccccgtcaggaggctccagcgggtgaggccgaagaggagcaccgccaccgctatgcccggcagcagggcgcaggagagcgtgccgatctggagagccgattttttcaggatgaccagcccgctgacgaagccgttggcgaagccgatcatgacgcatgccagcagggagcgctgcgcgatgggttcgcggaggaattgaagaaagtcgtccatcatgaaacttgggtttccggttgaggttccattccatacgtctcccggatgcgtgagggagcaagcacttcccccggggggccgaaggcgaccagctcgcggttcatcagcaggatggtgtcaaaaatgtccgccgccgtgttcaggtcgtgatgggaggcgatgaccagccgtccttccgccgccagggaatccagcagccgccccagggactggcaggccggggcgtccagccctgtgaagggttcgtccagcagcaggacgtgggcttcctgcgccagggcgcgcgccaggaatgcccgctgctgctgccctccggaaagttctgaaatctggcggtccgccagggattccatgcccagcgcgtcaagggatttttctacgatgtcccggtcatggcgcccgaattttttccacagtcccagggacggatagcggcccatttccaccagcgcgcggacggtgatgggaaaggaccagtccacgtcggaacgctggggcaggtaggcgatttctcccggcgtatcgtgaagagggctgccgttccacaggatttccccggaatcgggacggagcagtccggccagggccttgatcagcgtggattttcccgcgccgttggggcccatcagggccagcgtgtggccgcaggtgatggaaaagctgatgccgtccagggcaagaaggctcccgtaatacacgctgaggttccgcacttccagccggtggcggtccgggtggctggcatgcgcgccccagcagatgtggtcctgggcgcagtggggggctggactgtttatttccatgagaaggagtagctgtcgttcagggaagggccgaaggaccagcgggtggcggaggcggacggcctgccctccggttccagttccagcgtaacgggggtgtccggcgtgccttccggccagcgggcggaaacggtgagcgtcatggagccgtcttccagcggaaggccgcattccacttcttcatgcaggccgggcgtcccggattgccagaggacacggcctccatgggagatggaaagaaattccggacggtgggcgcacctgaccgtgatgaccgtgggaacgtccgcggcctgcgccgcgggggcggggaggtccgcttcctgtgctccgggggtgcctgccgtcatgttataaaggaagaaccccagcaggatgacgactcccagagtagggaaaaactggcgcaggggcgtgctggtcatggcctgggggacggggaaagggcttccttgatgatgccgacgttttgcttgaacatggactcgaacgtatggccgtccggagccagcccgtcggtattgatcggcttggcaacggggatgttcagggatttggcgatctccatgaggctcttggggttggaggaatattccgggaacagggcctttaccccggctgcgcgcagcttcttcagcgtggaggccagttgggcggaattgccttcgtcttcacggctcaccccctggatgctgatgctgcggaagccgaattccttgcagaaatggttcatggccgcgtgccccgtcaccaggatgcggtccgcttccggaatgtccgcaagctccttcctggcccaggaggaaagctggtccatctttctgttccaccgggccagtccggccttgtaatcctgctcatgggccgggtccatccgcgtgagcgctgcggccagggcgcgggcggcgcgtttcatattggccggggtgtgccaccagtggggatcgttggggccgtgggtgcagcagtccccgtcgtgcccgtggtcatggtctgcggtgtccgccgccacgggaacgtccggaatggaggcccccaggtccagaatttgcgccctgccgcccagggcgtccttcaacttgggaaggtacggctccagattcttgccggaggccagaaccaggcgcgcctgcccggcggcggcgatatcctgcggagcgggttcaaagctgtgcaggttgccgttggggcgcagcaggtccgccacctgcacgtggctgccgccgatggcgcgggccatatcccccagaattgggtgcagggccgcgattttcaggccgggggcgtcctgggcctgaagagtgcagaacaggcccagaagacacagaaaaggaatcagaatgcgccggagcatgttccgcattatgaaccgcccttcaagtgatgcaatggtcaaatttgtcttccaaagtgagatgacgctaacttttcggggcctctccctggctcttctttttgttcctcagcttcatggtgaacttctggtacaggaaggaggagatgagcacgatggcggccagccccaccagggctcccacgcggtacagctgcccgaggctggaaatgtcataacagacgactttcagcagggtgatgcccagcagggcgagtcccgccatgcgcaccctggaagacctgatgtcaaaccccgtggcgatcaggcccagggcaaagaggctccaggcgatggaaatggtgaggtcctgcgccacgctgctcccgaactggatcatcagcggacggtctcccggcgcggcgaagccgcaggatatttccgtattcatccagatgaaaagcaggatggccccgaaaatattcagggccgcgacaagaacgcggaggccggagctgcggcccccccgtaggcgtggcgtcactttcttctggacccaccaggctccggccatgcagcagaaaaccatggtggcgaacatcgtgcgcagggccggcattccggcagggtcaagctgcacgaaggcctgcgacaggccgttgcggacgaacaggaaggccagcaggaaaaatcccgtccaggccagcctgggcaggggaaatttgccgcacagcagcagaagggccagcccttccagggaccaggctacggtcaggggggcgcccgtccactggaggccgatggccagcgtcagcatgccgatggctgctccataataaaagcagaggatggcggaacgcttcaaaagcgtttcctccggcagccggcgcagggccagggccgccagcagcggaggcgccgcacaggcaagcgcgacggtggaatcccagaaatgggtggcctccggatggtgggccgttccgaagagccaccaggaaaggtagaagagggggaatgccagggcggaggcgctccaggccagcaagccgctgcggaaccgccggaccagcagcaggggcagcaggaagatcgccaggaaaatcaccgcggaaccggcagggtggatgtcctgataggacgccgcaatcgtgtacccggccgccgcggccatcagggcctgccctctccggtgccatgccgccattccgcagaacgtggccgccgtcaggaaaacgtaaaagggggaaggtgaaagcgggtgcatgaccagcagccacgcgagagccgccgtggcgaagcaggaaatcctgacgccgggctgaagctccgccaggtaggcccctccggaaggcgtgcgtgcggacagcaccgcataagacgccggaatcatgaataggcagaaaaggccctggagctgggaggatatccagagggcagattgcgaggcttcttccgcggaagactggtaaaaatagaaaacggtgaaaagccccatgggaagaaagcaggaccaatacgtgcttttggcgcgagccagcgggagcagggcgatcatggggagcatgcccgccagcaggaggagcaggtgggaggaaggggaaaggaaccggaagctgcactccgcctgaaggcggaatgccgtcaggcaggtgaccgcaatggcgcagaaggccagcaggaagggacctcccttccggtccggttcagcctgccgtgtgccggcataaaggccgtagcccccgtacaggagcagggtgcagatggacaggatgacgacggcgagaatatgggaggggccgccgtattcgtcaaaccagcccatcagcaggatggtataggcagccagtccggctcctccggctcctgtccacctggttgcggccacgacggcgagcaacccggcgttcaggatggtcatatacaggaacagggaggccgtatggtcctggccggtggacaggatgaccggggtcagaaagccgccgatgatgcccaggaaggcgattatgcggaaccgcaggcgcaccgccaggatgaaggccgccgccgtggtggccgccagcagaacggtcgcgatggccgtcgtgaagaagggaagctcgtaaaacatgcgtccggcgcaggtagccaggtacaggaccaggatgcccgtggaggtcagcgtgccggaaaggatggggtacttcttcctcagccgcgacaggccggcgcccagcaggccggcggcagccagatacgtgaggattaccctccattccggagagatcagatcattgtcaatgctgtacttgacgaagaacccggttcccagaaacagcacaaatcctcctatccaggagagcagcttggcgccgatgaagtattcccaggaaaaggacgcggggcgcgatggtgcgggcctggcgttccggaccggctgcaggctgtgccgggagggaagggcgcaggcgggttcccgtaccggggcggcggcaggaagcgtacggatgggctgcaccggactttccacagggggcggaaggctctttctggtttccgcggggggcctctggggggaggaacgggaattcagacgttcctttaatccggagacttccgtttccagagtgcggactttttgttccagagaaacgacctggcaggccttcacaaaggtgaagaccattccggaaagcaggccgaggaccagcagaagaatgaaaaattccatggggagggaaggggtagggaaaatgtattctacaccggaagaatgggactgcaagacgcaaaaaggtacatggccgcctgtcctgaaagagccgcacggaaccgccggctgagggccgtcccggcggtggatttcatgcggggggcggaatgggccaaggcggcacaggaaacgttcgcggggaagagaccggaaggcgcgccgcctggaagcccccttccgcacctttcccgggttgacgtattgaggaatgggagcggacggttttttcttgaggtggaaagtgttttctgattccattatcgcgcatcatcatgaatggttttcaacttcttcaatgtggtttgagcgtggctgccctgctgggcggctccgcccttgcggcgtcacctgccgtgtacccggttccccagcagtccaagctctcctcccagacggttgctttctccggaaagccttccgtggtgattcgctccgccaggacggcggccagcaagctgctgaacggcgttccggaaaaatccggggcctacaagctggtcgtctccccgcagggcaaagtggccataggcgcccatgacgagcggggcgctttttacgccatgcagacgctgcggcagctcggcacgaaggccggcggcgaaggcgtgaccttgcccgtaggggaaatcacggactggccggacatcgaattccgcggaacggtggaaggcttctacggcactccatggagccatgaggcccgtttgagccaactgcgcttttacggccagaacaagatgaacacatacatctacgggccgaaggacgatccctaccactcctccccccactggcgggacccctatcccgcggaccaggccgcccagatcaaggaactggtgaaggtggcgaaggaaaaccacgtggactttgtctgggccatccaccccggcaaggacatcaagtggacggaagaggacatgaacaacgtcatcaaaaaatttgagatgatgtacaagctgggcgtccggtcctttgccgtgttctttgacgacatcttcggcgagggaaagaggggggacatgcaggcgctcctgctcaacaagatcaacaacgaattcgtcaaggtgaaaaaggacgtcacccccctggtcatgtgccctacggagtacaaccgcggctgggcggactccaagccgggaacctacctggacattctgggcgaccgtctggacccctccatccacgtcatgtggacgggggactccgtctgccatgacatcacgctggaaggccagcaatgggtgaacaagagaatcaagcgtccctcctacgtctggtggaacttccccgtaacggactactgccgctccaacctgtgcatgggccgcgtgtacggccttgccacggaaccgggcgcgaaggaatccatgggcggcttcgtctccaaccccatggacaagccggaggcctccaaggtctccctcttcggccttgcggactacacctggaacatcaacggcttcaaatcggaggaatcctggaaggaaggcgtcaagcgcctgttcccgcaggcggcggaagccatgcaggtctttgtgaaccacaactccgaccagggtcccaacggccacggctaccgccgtgaggaatccgtggaaatagaacccgtggtcaagcgcgtgctggaagccgcccgggaaggcaaggtggccaaagcggatacggccctgctcaagaaggaattcgcccgcatggccgctgccgcgcccgtcatccgggccaaggcggacaacccccgcttgatgaaggaaatcggcgcgtgggtggatgcctttgaacaactgggccgcgccggccagcatgccgtggcggcgctggaggaaaacaacaccagggacgccgtgacccagctggtgcaggccacgcaggccctggcggccatggacggcatttcccgccgccacaaccaggaaggccaattgtaccgctccgtggtgaaaaccggttcccgggtgatgacccccgccgttaatgaactggcggacaccgtatccaaaaaagttttccccgctattgcgggcactccggccctttcccccaagcccctggtcaaggggggcaatatggacaaggcggaactcttctgtgacggagaccgcggctcctactggcactccggcgcctatgggcagccgggagactggtatggcgtggactacggcatgccgattcccgtgcggagcgtggaagtgctgatgggccgcaatgacaaggacagcgactatgtagccagggggcagctggaaggctcccgggacctgaaaacctggaagccgctgggaccggaaacctccggcatgcaggtggtatggaaggcgtccaagcccgtctcactccgtgccgtgcgctaccgcgttattgaaccgaagaaaacggacaacggccgcgccgtctggaccgccgtgcgtgaaatagccgtcaacacgcctccttcagccatggccgcctccaacgtggcggggctggaaggcgtctccgtgcagaaatccgacaaaatcgtgcgcatcaaccgcgtgatggaaacgcacaaaatgaagcccggcgaattcatctccctgcaattggaaggccccacggacgccacctggctggaagtcaacctggaacgggatgacgtcaactcctgggcggaagtggagctggacgtggaaggctccgccaagcccgtggtgcagaagctggacaagcagggtaaaaacttcattgccagggcgaaccagctccccaagggaatcaagggcatgaaactggtcaacaaaagcggcaaggaacaggacatcgttctgaacatgttcaaatttgacgttcccccgtcggaccccggcaccagcctggtctccctgagcgacaggaacctgaaaacggtttaccgcgccgacaagccgctggacgtgatcgtccccaatctggacaaccccaaggctgccaaggtagtcgtggtagggtccgccgccttcgccatccaggcgcgccgcggcgagggagcctggacgccggtgggcaagcggaacgccggacccggagcttccgagtttgccattccggccgggaccactgccgtgcgcctgacctacaaggccccccagccggacgcgatcatcaatgaggtgatcttttcctcccggaaatagttgtttgaggcgctgatgcctgatgttgcggctccgtccggattttccccggacggagcttttctctttgaaaagatggaaatgcagcgtgaaggctgtttccatgcatcatgggggaaggaagaacccgcattccggcgggaacggcggccattctcccggaaacaggttaggccccttcttcttcccgctttggcagcttgttgtggaaacaaccttgaccctgttggatgcggggctaaaatactgccatgacaccgggctttcattggactctccgcccttccgtgaaggaggatgatccggtcttgaaagcgtttcccgcggaactgcccctgctggtcaagcagcttctgctgcagcgcggattcaccggggggacggaaacggaactctttctggaccccaggctctcccacctgagcgaccctttcctgatgggggaaatgagggccgccgtggaacgcatcttccaggccgtggacgaaggggaaaccgtgtgcatttacggggactatgatgtggacggagtcacctccgtggcgcttctccgggccattctgatgtcctatgacctggacccccagtacttcatacccgtccgttcccgggaagggtacggactcagcgaggcgggcatagagcgctgtctctccgaatgtgcggaaaagcccagcctgctcattacggtggactgcggcacctcctccgtgaaggaagtagagatgctcaacagcctgggaatagacgtcatcattctggaccaccatgaagcggggccgctgggccggccggacgccgtggcggtggtcaatgccaaaattgaggaaaacagcccgtacacctacctgtgcagcgcgggcgtggtcttcaagctggcgcacgccctgctgaaggagcggaagctgaaaacctttgacctgaaactttatctggacctggtggccgtggctaccgtggcggacatcgtccccctggtggatgaaaacaggatactggtgcgccacggcctgggaaggctggcgcacagccgccatacgggcctgaaaaccctgacggaaatagcgggcatccgcccttccgactccgccaaccacgcgggcttcctgaacgccgcgcacgtgggattcaggataggcccccgcatcaatgccgcggggcgcatggactcccccatggatgcgctggaacttttgctgaccatggacaacaggcgcgccgtgcagcttgcccagatgctggactcccacaaccgcaagcggcaggaggaagaggaagccatccgtacggatgcggtggaaatgcttcacaactcctttgatccggagcgggacaacgtcatcgtgctgggttcccgcgcgtggcatcccggcgtggtgggcatcgtggcctcccagctcatgaggcggtaccacaagcccaccttcgtcatcgcctttgatgaaagcggcgtggggaagggatccggccgctccattccgggcgtgtccctggtgcaggccatccatcactgtgcggatacgctggtttccggcggcggccatgacatggcggcgggcctcgtgattgaggaagcccgcatggatgatttccgccgggccttcaaccggtacgtctcggaaaccaccacggaggaacagcgcagccccgtgctcaacatagacatggaagtctccttccaggcgctgacgctggacctgctggacagctatgaaaagctggaacccttcggcaactccaatccccagcccctcttcatgagttccgacgtcttccccacggagccgcccaagcgcgtgggaaccaaccacctgaaactcttcatgcggcagggaatggtggagcgtgacgccatcttcttcaacggggcggagcgggaactccccaatcccccctgggacatcgcctttacgattgaccggaacgtgtaccggggccgcgcctccctgtccatctccattcaggaaatacgctcccaccgggaaatgtaaggaggagcgcgaaggaagagagttttctataaccaaataaaaacggcttattgcgttgaatagcaataagccgtggaattataaatgatttataaaatctagaccctgggcaatctcaacaggttgtcatgaggagtgtcatttggttcggaccgcacgtatttttctcctcttgagctgatagcatcaatgagctttggatagaatggaccgatatctacacgtacgacattacctttccggacaaagtcatgaactgcttctttaggatagaaacgttcattgcctaatccggtgagatagattgttgcgatttctaatgtagacgtaggattggtacatcctgtcttgagtgttattttagtcgcgtagaccatatgtttttaacggttacctcactaccagattgacaccatcctaatgaacctatataaggcacttgatactgatcaagctgatgacaatctctgcgtgaggttgtttatcagaagcaagagggtaaggcgagacaggtcttaccctcttgttgttccgaaggcactgtaaccctaaaaagaaggatgttcaatcatttttttattcctatcagtagagaaggaaaagattcgacgatgacttaaagcataattgacgtcccttctcgtcatcaactatgatgaagtccttctggaaagggtttgctttttgccattattggaatgcaatcatatcttcataaggtgtgattgaacttataattgtttgtaatatttcagacagttatgtcgtaccttgattggtacgtggattgaaacctatcggtagagaaggatgaaggatatgaattgcccagctgacattggttcagctgggcaattttttgtgaagagaatgtcctctctccaaaattttaatgggataaggagagtaataacgtcatatgtattttaggaccttgactgaactggtccaaaaagtattctcacatcctatcccccattcagggcggagttatggtaaaaataagcaagatgaacaccctgttccttcaaggtcgtctattgctgcttctcggacggtagtccgtgaagatatcttgatatgcgccggtgagccgttccggcgcgagagaagtaaacggctggtctttatttgcgccaaaggaatgattccataacaggagcgttttccgtgcgcagtttccgaaggaacgaacccttaacattttttactgtaatgaaagaacatatacacatttttgatacgacgctgagagacggggaacagtgccccggcgcggcgatggccgtggagcagaaaatacaggtcgccatgcagctggaagctttgggagtggacgtaattgaggcgggcttccccgtcatctcggacggcgacttccacgctgtccgcaccgtggcggaacgcacggaaaaaagccgcgtctgcgggctggcacgctgcgtggaaaaggacatcgttgccgcccatgaggcgttgaaggctgccggagagcgggaacgcatccatctggtggtggccacgtcccccatccaccggaaatacaagctggaaaaaagccgcgggcagatcagggagatggccgtcaaggccgtcgccatggcttccggattatgcggggaagtgcagttctctgcggaggacgcctcccgaacggagccggaattcctggcggaaatggtggaagccgtgattgatgcgggcgccgccgtcgtcaacattccggatacggtgggatacacgatgccggaggaatactaccgcctgatttcctacctgaaatccaacgttcccaacgtgagccgcgccaggctgtccgtccactgccatgacgacatgggaatggccgtagccaattccctggcggccatccgcgccggggcgcagcaggtggagggcactatcaacggcattggtgaacgggccggaaacaccgctctggaggaagtcgtcatggcgctgcattcccgtccggatttcttttccggcgcggggaccggaatccggacgaaggaactggtgaggaccagccgcatggtggccgccatgagcgggttgcccgtctcgcgctccaaggctgtggttggggcgaacgcctttgcccacggttccggcattcatcaggacggcgttctgaagaaccggagcacttatgaaatcatggatccggaggaaattggctggggagctacggaactgcccctgaccaagcattccgggaggcatgccgtgaaaatgcgcctggatgcgctgggcttctccgttccggatacggacatgccgcgcctgtttgaactgttcaagcagcgtggggatcagtgcaagttcgtgtatgacgacgacctggccgccatggtgaacgccatgcgcgcgtgaacctcctccgtccgggaattctgcggagaattcccggacgttttgtttttgttcacgatgaaagccatctcatcctttacggtgaagaattcctgtcaagggtgggctatccgggtttgctccggaaggtttaccatttcttttttgcttcttttgcaggctgcgggagggaacggtcttcaaggttttaatgccgccttcattctgcctgaagaaggcgcatggccgggccgcatagccgcccttgggattagtggagagttgatgaagccgtgattgatgcgggcgccgccgcaccgttttggtggatgaaattccgctgatgcgcaaaaagtattttaaacaagcatattacgggaggcaaatatctatggctttattccctgcacattgactatccgccttggacctgtataatcatcccgctgatattttagaaaaaatggggcaatgaaggtaaagatcggattcatggaaggtgccgaggaatggcagatcaaggtgtttttataccgtttcaggaatattgatccatccattctcgagtttgaaattgataagaacaatgcggattttcttattgcctttccatggttgtataggtcaactaaagaaacatttcttcaatttttacaggaatctgtaggaaaaatcacgatcatggacgtattgggagaagctatcgcccccaatttgaatctgtttgactaccatatagggtttgatccgtccggccaggacgggcgcgtgctggaagctccctatattttttcttaccgtgttttactggacagtcggtctccggaaaatttgtccggagtcctggccggaaaaagcggcttctgcaattatatttattcccatggggaggggcatccgtaccgcatccagttattctcccgcctttccgcttacaagaaagtcaatgccataggcaagcatttgaataatacgccctgtaattttcccagggagtccgatgattggatgaaaggaagcgtgctactgaaggaaccttataagttttccatctcctgtgaaaatgcctggtacaggggatattccacggaaaaaataatcacgagtttccaggcccgctccattcctgtttactggggtaatccgttaattgaagaagaatataaccccaaagcttttatcaattgccaccgtttttcctcactggatgaagtagtggcagagatcaggagaattgatgaggatgatgagctgtggcgttccatggtggcggaacccaagcgcctcccctggcagatcgaacgcacacaggagaaggaagataaaatgatggcggcgctgttggaaatttttacatcgcccgtggagcaggtgaaaaaaaggggtgacggcttgtggctggatcattacaggaattttttcatccgtcatttaggcagcaggaagaaaacgcctaaggaaaagctggaaattagattgaagaagctgttccggcggtcttgaacggtgcaaaagaaaatccccgcaagtttttaacttgaggggatttgttttggtaggcccggtagggttcgaacctacgaccaagggattatgagtcccctgctctaaccgctgagctacgagcccgttgaagaacaacgtggacgaatgctagcagaatttgaagaggaaagcaaagtttttatcctgctgtaaacgttttggatttgcagacggaaaggcatggagggtgaagcggaaaaagggctcagacctgcagtttcgtccagctccggcccttgacgattttatagaggatggtggactgaacggccatttcaaaggcgaagagcagccagatgccccacagagtcatggtttccggggcaagcttgaaccagacccatgtgcagacgacgcggaagaagcccatgatgccgtaggagatgaacatgaccctccgcgtgtcgcccgcgccgcgcagggacattttcatcacgatgcaggcggcgaagaagggctccaccagcagcatggtgcgcagcacgggaatgccggtgtcaatgagcgtcatgttgccattggagaatatctccatgaagagggaggggaaggcgcagaagagcacgcccagccccgtcatgaagatgatggcgtaccgcatgcatttccagatggtgatgcgggccatgagcgcgttccgggcgcccaggtactgccccaccagggtggaggccgccatgccgatggcgaatccgggcaggaagcttaacgattcaatgcggacggcgatgttgtggacgccaagcacgcccttgatgggcagttcgctgatgatggagaggcagaacatctggatgccccacatgccgaagacttccacggcctgcggcagcccgattttcaggatgcgcttctgcatgcccatgtccggccgcagatgggagaagctgaggtacagcggcggagcatagtgttccccgcgttccttgacgagttcttccagggattcgttttctcttcccgcgaatatttttttcctgcgccgcagcatgatgaagagaagcgcgcacatgctgatgccgtagccgcagaccgttcccgccgcaatgcctccgatgcgccagccgcccagcggggcgtccgcaaagacgaaggtgacgctgaaaatgacgttgaggatgcccacgcccatcatgatccagaagggcagccgcgtgtctccggagccgcgcagggcggcattgatggcaaagaccacgccgctgaagggggccgcgaaggcggccacatagacgtattgcagggcgtaggccctggcggcttcattcatggtcagcacgtgcgtgaccaggaagccgctgcatgcgaaaagcaggccgcaggagatgacgccggccagcaggcccagcatggcggcctggtgcaggccgtgctgcgcctgggggtaatccctggctccggtcatgcgggagacgatggccgtggcccccatcatgatggacccctggatgacgaagccgaaccacatgaggaagacgacagcccccatgccgtcggagatgttgatggtgtcctgcgcgtccagcccgattttggtggcaatgaagaggtcggaggaggtgacgaagaagctcagaagctgttccaggaagggccagaaggcaatgacggcgatctggcggggcagggacagtccggcaagtttaccccccaggcgggcgcgcgacgccctgccgcggataatgccctctctcgcgtcacccgcactcatcgctgggcggtgtagatgctggcgatccccccgttcaggggttccgccgtgatgttgctgtagccgcagtcccggagcaggtcctgcatggcctggccgctgggaaaggcttcaatgctttccgccaggtagtcgtaggcttcccggtggccggtcatccagcctgcaatgacggggaggatgcggtgcaggtaaaaacggtaggggcttttcagcaggttttcaggcagggagaaatccagaatgagcaaatggccccccggccgcagcatgcggcccatttcccgcagggcgtccggatagctggccatgttccgcaggccgaaggcgacggtgactgcatcataggatgcggaggaaaagggcaggttcatggcgtccgcacagaccaggttgtccagtccccgtttggccgctacgtccagcatgggctggcagaagtcggaaccggtcagccggatttccggcatggcgttcaggatggccagggccagatccccggttcccgtcgccaggtccaggaggcgttccggcttccattcggagacgagctgcacgacgcgctgccgccacagcaggtccacgcccatgctcagtacatggttggtggccacatagcgcggcgcaatggcggaaaaagcggctttgacgaattctggattgcgcatgcggatggatagtaaaaaagagcaccataagtgctctttttcatgaaggaaaggggatggggtgtcggacggggctcgaacccgcaacaaccagaatcacaatctggggctctaccattgaactaccgacaccatttaatgttgtggtgcggcagacattacccgtcctcttccgttttggcaagaagaaaataagtttgatgagttttttagacggaatattttctcaaaaataaaataagggacgggtaaagcaattatttgtttcccatttggaaagttacggggtgtttgcgtggtcttctattgaatcctcctggatttgatgtagacttttttattgtgggaattgatgtaatacacaccgcctttcgggccaacccggtaggttctgttttcccgtgcctggagggcgcggggggaggtgtgttctccgggcaccattcctgcacacaggggcgtgtattccggaagaagcggcttgcggctgcattggagcagagagaggagaagaggaaggatggccgccgggaggaaaagagagtgcttcatcagagcgttattatctttttcagaaggttgttttgtcaagttggagagtcgtgctgaacggttttttatgagaagaatatgattttttctgcattatttgaaaacgaatgtttgaatttattttatttccaattattgttgccacagtcacagatgcctttgagtcgttaaccagccagttgtccttatccaagccatgaatttctttcctcacattcccatgttgtccactgtgttcagcagtatcggctgctatttactgccttttggcgtcgttttgctgtggcttctgtatgaatcaagaaaagtaaaggccatcctccttgccgggctggtgattctgagcatggtgtgcatgttttttcatgaggcatgtgctcccagcagggaatatccgtgggactgcatggtggagcacatatttacaggaacgcttctcccgttcctctgtctgctgggatatattctgtacgtgtttctttgcgcctgcatcccggtgtacaggaaggtgtggaagggcatcggcttttttgcccttggagtaatgagcctggcttttgagtacgtgaatgtttcctttccggtgatgctgctggcgggttatttgttccgtttcttcctcttccggaagttccggaaccacatcccctttgtcaggaagtgccacggagtgcttgcgataggagtggtgcccggaatttgcctgatcagcgttgtcagcgccattttgtttcccccgccggagagttttatttgtgagaagatcaatgaggaaatggcgcgtgacatggccctgtggaattaccagagcaacctggttctgctgtccagccgttttctgaatgtggaacgcaagaaggactgcattaccgtaaagtattattgcgagacgaatatgggccctgccgtgtacaaggcattctgcaacaattatggcggttatgtgaaggcggagtgttccctgctgaacaggcatgctccctgatgacggaggacaacggcgtttttccgcgaggggccggtcagagttctatgtctccggtaaagacgaggtcccccggtccggtcagcgtcacgctggtaaagcggtctcccgtgcgctggaagcctactttgagcgtgtcccctcccgctacgtccacttgaatgggtgaaggggcatccgtcaatacggcgtgcagcagcgcgctggcggtcatgcccgttccgcaggcaagcgtttcatcctccacgccgcgttcataagtacgtatggcgatgtgccccggagacaggattctggcgaagttggcgttggtgccttttggagagaatgcgctatggtaacgcaggtaggcacccagacggggaacgtccaggccgtccagcttgtccagaaacgctacggcgtgcggaacgcctgtattcaggaagtggacgtccgcccccaccgtcgggtccgcattcagcacaaagagctgcagggagtggggatccgtcaggttcacggtgacattcccgtccttttcaaaggtggcggtcacgatgccggccatcgtttcaaaggggaggggagcggatttgtcgtgatgaagcagggccgcggcgaagttgccgaagcagcgggctccgttgccgcacatttccgcttctccgccgtcggcattgtaatagcgcatgcgcacggttccccctttgccccgggacggttccacggcaatcaggccgtccgccccgatgccgaagcggcggtcgcacagggcttcaatggtctccttgtccagcacggaggaaagttccaggtcacggttgtccaccatgacaaagtcatttccggcgcccgtcatcttgtagaaatgaagcagcataatagtaagttgtgttgtgccggaattttaatgcggccgtccggatttggcaaggcggcttacatgaatgacatggcgtccacgtcgatcacggcggtcaggtcgtcccccagcccggcttcctgcaccagcttccgcagggtgcgggagaggatgcgggcggacggccccttgaccgtgatctggaatctgaactggccgtgtgcgcggggaatgggcgccggcatggggtccgtcatcgtggctggagggggcagcatgccgcggaggcgcgccgcgagcgtgcgcgtggcgaattccgccatgttttcatgctgggagcgtatggtcagcacggcgatgtgggtgaaaggcggcaggtcgaaggagcggcgcatttccagctcctgcgccgcaaagccgtccgtatcgtgatggcgggcgtactgcagggaaggggactggggggtaaaggtctggatgatgacctccccggaaaggtcgccgcggccggcgcggcccgccacctgcgtcagaagctggaaggtgcgctctcccgcgcgggggtccgggatatggagccccaggtccgcgttcagcacgcccaccagcgtcacgttgggaaagtccagccccttggcaatcatctgggtgccaaggagaatgtctatcttatgggcgcggaactggttcagaatggttctgacggcgtttttgcgccgggccacgtccgcatccacgcgcgtgatgcgcgccgcaggaaaggtgcgccgcaggatttcctccaccttctgggtaccgtacccctggagcaggatattggcggatctgcactccggacaggtgcggggcggcagggccttgaacccgcacaggtggcacatgaggcggtcctccgtacggtggtaggtcaggggcagggagcagtgcaggcacgtcaccacgtggccgcagtccggacactggatggagcgtgcgaatccgcgcctgttgagcagaaggatgacctgttcccccttgtccagccgccggtcgatggacattctgagccgctcggagatgacgttggggccggatttgtttctgccctccgtcttcatgtccagaatgcggatgagggggagctgctggccgtccgccctttccgtcagcttcaccagggaatattttccggtcagggcgttatggatgctttccagggaaggggtggcggagcccaggaccacggcgcagtcttccagatgggcgcgcagcacggccaggtcccgcccgtggtagcggggggagctttcctgcttgtaggacgcgtcatgctcctcatccacaatcaccagccccaggttctgaagaggggcgaagacggcggaacgggggccgatgacgatgcgtgcctttccggaacggatggcgtgccattcgtcaaagcgttctccgtccgataggaggctgtgcagcaccgccacggaagagggcagttccgcaaaacgggatttgaagcgctggacggtctggggcgtcagggagatttccggtaccatgatcagggcggattttccggatttcaccatttgggagacggcctgaaggtaaacctccgttttgccggagccggtgactccttgcaggagcaccggttttttgtgctccgccgtgcacatggccgtgatttcttccagcgccttctgctgctggtcgttcagcttcatgggctggctgaggacgaattgctctccggtgctggggtcgcggtgcacggattcctccttcagggagatgaagcccttggccgccaggctgcgggcgatgttcagagcccccgtgccgaatgcggccagaggcgcttccatctgttccgcagatgaaaaataatccagcatttgggcctgccggggcgctttgcggtacagggcatccagctcctcacgggacggacgtttttccagatgcaccattttccgcattttttccgccgtgttttcctgacggacggtttccgggagcaggcagcggatcatttggtccagcgctacggaataatagtccgccgcccaggaagccagattcatcatgaccggggaaatcaagggttccgggtcgatcagtttcagaatgggcttgagcctgtccttccaggcagggtccggctcggacagcgtaagaacagtgccggtggccgtcctgttgcgcaggggaacctgcacgcggcagcccggcctgacgtccccagcttccggcggaatgccgtagtccagcaccagatcgctttgtccgtcaaccagaatgcgcgccgcctgcatggagtgaaaggggggaaggaataattgttaatgataaccgaaggggaagcgggctacgccgctcatgtctttcagcacttcaatgtaattatagccgtagccgtccatgatctgcgtcacggctgccgcctggtcatgtccgatttccagggctacgaagccgttttcattcaggtagtcccgggcgcgggccagaaagcgttcaatgatttcccagccttccgggcctccgaacagggccgtatggggatctttcatgacttccggggcaagctcctctccatccgcaatgtagggcaggttggccacgatgacgtcaaagcgcatttcccgtccggcatccttctcttcctcctcaggcacggaagcggaagaatccgctccttccgggcgcaggaccggtttttccagggggatgttttcaaacaggtccgtctggacggtggagaccctggctcccagccgcatggcgttttccagcgccaggtccagagcctgcggggaaatgtccgccagaacgacttccttcgcgcgctccttgagttccagagccagcgtgacgccgatgatgccggagccggtacccatgtccagcacgcgtaccggacggtccgggattttctttaacaccatttccaccagttcttccgtttccgggcggggaatcagggcgcgcgcgtccgtcaggaaatccctccggaaaaattccgtgaaccccagcaggtgctgcagcggttctcccgccgcccttcgtttcagcagctcgcggaggggagccagttctgtttcttcaacaggcctgtcaaaccgggagtaaagagccgtgcggttgcagtgcagaacgtgggccatcaggtgctgcatggtggcgcgcgcctcgtcacagccctggcgcgccaagtagtccgtgccggactgaagaacttccagtagggttttcatgaaaggaaaagggggttaggacatgccggcttccgccaggcgttcctgcatttccgcatgctggagagccatgatcaggtcttccatttgccccagcaggatgccgtccagattgtgggacgtatagccgatgcggtggtccgtcaggcggttttgcgggaaattgtacgtccggattttttcttcacggccgccggaaccaatgaggttgcggcgtgcggcggaatatttttccgcctcttcccgcttcttggcttcaaagagcttggcgcgcagaatcttcatgcctttttcacggttcttcatctggctgcgctcttcctcgcaccggacatagacgcccgtggggatgtgccagatctgcacggcggattccgtcttgttcacgtgctggccgcctgcgcctccggaacggcacacttcaatgcggaggtcctccgggcggatttctatgtccacttcctccgcttccggcatgacggccacggtggcggtagaggtgtggatgcgtccctgcgtttccgtggcgggaacgcgctgtacacggtgcacgccgccttcatacttcaggaagcggaatacttcttccccggcaatgcggcagactacttccttgaagccgcccacgtctgacgggctgctttccaggtgctcaaagcgccagccgcgttcttccgcaaagcgctggtacatccgcagcaggtcgccggcgaatagggatgcttcatccccgcccgttccggcgcggatttcaataatggcgtcccggtcttccgtcgtgtcgcggggaagcaggctgtactgcacgtcgctgcgcagtttttccagcgcggcttccagttcgggaatctccatggcggccagttccgccagctccgggtcatccgtcttcgctagctcctgattgtccgccaattgctgttccgtggcgttcagggaatcccacgtttccatcagttccttcaggcggcggtgctccctcatggtttccgaggcccgcttctggtcattgaaaaaatccggttcggcaatgaccgtttccaattcttccaggcgctggcggcgtttttcaatgagaggtgtgtaatccatggcgtttgcgtgtaaggaattctaaaagataacagggctttctgaaagccaaatccgggggatgtaagacatgttccggcatttgaaaaggagggggataccgcttcctgccgtcctgtccgcgctttcctgattccggaggaaccggaccaaaagaaaaccgcaaccattacgtttttccaatatgccttccctggagaaggagagcggaagcatcgtaactgctgcggcggtaaagctggcatcgcgtacgggactcgaacccgtgttgcccgcgtgaaaggcgggagtcctagaccgctagacgaacgcgacttttaggtttgcagggactgcgcggcgaagtaaatactaccggaggccgaaaggcaagaattatttgaatctgagtttaaaaaaatcgttatctgccttccggaatgtgggaatcgtcataatcgtccagcctgtgctgccagaggtagtaccgcgtttgctggacaagcacgccggaaagggccagcagggagatgaggttgggaagggccatcagtccgttggcgcagtccgcaaacacccagaccaagtctatcttggaaacgcagccggcaaagaccgccgccacccagatgacgcggtagggtttgatgagcctgacgcctcccaggtattccagcgctttttccccgaagtaggaccagcccaggatggtggaaaccacaaaggtgaccaggctgagcgtcaggaggggggaacccatgtagggaattttgctgaaggccagggtggtgagtttggggccgtcgctgcatgaaatgtccggatgggcgatgatactggtggtcagcacgatgcccgtcagggcacagatgacaacggtatcccagaaaggcccgctggaggagatgagcgcctgccgcacggggttgcggttctgcgcggcggcggaggcgatggccgcagagccgaggccggcttcattggagaaaagaccgcgggctacgcctgtcctcatggccgtcatgacggccgctcccaccacgccccctgcggcggcttcccccgtgaaggcgcagtccagaatgtaccggatggccggaaggacgtagtccgcctgaacggccagaatgtacaggcaccccagaatgtagatgacggccatgaacggcacgaagaaggcgcataccctggcaatgctccggatgccccccagcatgaccatggccgtgaggacagtcagaacgatggccgttccccatgagggaatggagaatgcgtgatggagctgttccgccgcggcgttcccctgcgtcaggttgccgatgccgaaggcggcaatggccgtgaagacggcgaaggccacgcccagccatttgcatttcatgccgcgttccagtacgaacatgggaccgccgctcatgttgccgtccttgttttccacccggtacttgatggcaagcagaccttccgaataccgcgtggccatgcccagtacgcctgtgagccagcaccagaagatggctccgggcccccctgcggcaatcgccacgcctacgccgatgatgttccccgcgccgatgttggcggccagggccaccatcagggagctgaacggggagatgtcccctttgtccgtatggtccttcacaaagtacagtttcagggccttgagcaggtagcgctgaggaaagcgcaggatgatggtgaggtacaggtgagagccaagcagcatgatgagcagtggccatccccacaggaaactgctgaaggcggacagccaggttgtgagcgcgtccccggtctggaaaaaggcgttttgcagggcttcaagcataccggaaagactctaaggaaaaatgctgtggtggcaagtccttaaaacacgggaagggcacggaaaaacaacttctgcggttccggcgcaggaaagccttttacaagggcgcgttggcttaatcttccatggagaacggccggggctggtccggaagccaatttccatgtgatcaatgtggaggagtgcctcaagcccctccggctctcctcatgctgtttaatgaagaatgaaggaagggatgatagttgcttgtctccggggtctgcggtctttatcataaggcctatgacgggagcggcagatgacgttgccccattgcccggcatgcgggtgtcacgccgcattccggccatcatcttgaaccaaggggaaaaatgattgtttttacggaagaaaagaagtttaccagggaaaaagtgcaggagctgttcctgtccgttggatggatttccggccagtatccggcccggctgtacaaggccctgatgaattcgtccacggtatttaccgcgtgggatggcgaccggctggtcgggctggtgcggttgctggacgacggcgagctggtagcctacatgcactatgtcctggtgcatcccgactatcacggcaggggaattgcgggaaaaatgatggaaatggtcaaggagaagtacaaggactacctgtacattgaaatcatgccggaggagagcaggaacgccgccttttatgaaaagcatggcttccatgccatggaagacggcgtacccatgcagcggtgcaatttttcaaacaggacttaacgcccgcggctggacagtcaatttccggcaagcgcggaaggcggggcgttatttcgtgtggccgggatacagtaaacccgcgggtatcctttcggatcttggctccgcgggtttaccttctcatcccggattagctccggaaaaggttcagattcaattccttgataatggattgaagagctgcctggcccttcacggtgtttccggcggggtccagaggcggggagaaggccgccatggccatcttgccggggaccacggccaccaggccgccgcccacgccggacttggccggaacgcctgccttgtacatccagtcccctgtggaatcatagaggccggacatgcacatttccgcgaggatgggagaaacgttctcatccttcaccacccgctttttgctgacggggttgacgcccccgttggcatagcaggcgcccatcagcgccagctgggaggtggtgatgttcagggagcacatgcgggtgtacaggtccacaatcatgggcggcgtattgtaaaaatagccgtagctgtccaacagccacgcgatgccgcggttgtgctggttggtggcgctttccgacttgtaaatctcctggttcacggtcagggccgtattggcgaagttgttgaaattatggatcatgttcgcccatatttcatcggagtccgaaccgttgaccaggctgactgtcgccatggcccctgcgttgaccagggggttgaggggcttgccgccgtgcagctcaatcgccatcacggagttgaagggctccccggtggggtctgccccgatcttcgtgcgcagctccttcattccgatcagatccatgacgtaggccaggttgaaggccttggagatggattcaatggcaaagggcgtgtccgcggagcctgcggtcaggatatctccgttgacagtgactacggcaatcgccagcaagtctgaggggacttgcgccagagcggggatgtaggaggcgtttttgcctccctggaccgttttggcgtaggcgtacgcgttgtccacagccgtctggatttgttctttggtgggtatgtcactcatgatattattgaaggctgaaatgataaattaatgattgccgttcgtcttttcccaaccgaagggctcaaaggcgtcttccggggataccgggcgcttccaggacggcttggccatggcctggatgatgaagggaatgccggcgaagatgaaggttcccacgaccagcagcagaatatacatggtgttgctgcccacggtgatctggttcggcgggatgaagctgaccaggaaggccgccaggctggccaggaagccgaggccgccgactacccacatgccgaaggtcttgccgccgggaatccggaaggtacggggcgtattcggttcacggtagcgcagatagatgccggaggcgaacatcagcatgtacatgatcaggtacaggatgatggtgagctgtgaaatgatctggtacgtggactgcacggaaggcatgattacgaacatgacggacagcagggtgacgatgcccccctgaatgagcagaatgcccatctggacgttgttcttgttccgcttctgcatcacgggcggcaggttgccggtcaggcccacctggaaaagacccttggaggggcctcccacccatgcggttacctgtgccagaacgcccacagccagggcgagcgccagaatccagttcatccagccgaggccgaagaagctgaaatagtcgtcataggaaatcagcaggctctgcaccaggttgatctgggaaccgggaatgatgaagccgatggcgagcgtgccgaagacgaagatgaccaccgtaatgatggcggaaatcagaatcgccagcggataattgcgcccggggttgctcacgtccttgacgtgcacggcggacatttccatccctgcgtagaacaggaagatactggctgccagcaccaggttgttgaaattgctcatgtccgggatcatcttgtcccagttcatgtccagcagcacggggttgcctccggcccagtagctgatgccgaggagaatcaggatggcgcccggaatgatggtgccgatcatggtgccccacttggtgacgcctgcagaggtcttcatgccgcgcaggttgagcagggtggctccccagtacacgcacagcaccacgatgagcacataccatttattggcggcaagcgcttcatcccatcgctgtccgggtcccataaaggccagggagacggcggcgaaagtcagcacggtcgggaaccagatggtactctcaatccattggagccagatggccaggaaacccagctttttgccgaaggcttcacccacccaccggtaaacgccgcccttctggggccatccggtggtgagttccgccgctaccagggagacgggcaccaggaaaaaggccgcggcaaaaatataataaaagacggaactgagtccgtacgtgctttccgccggcatgccgcgcaagctgacaatggcggagacgttaatcatggcgagcgtaaacacccccatgcgaacggcggattttaccgccggagcgttattggttgttgcgggtcctgttggagaggtccctgattgagtcgtattattcattggtttattccgggttgagaattgggacggcgtatagaagtgccgacaccggccttatctgaacgaccagaaaaagagctctttcgttgaagagatggtgcagataggggtgccggagtctgtcttaacggcggttaccgctttccggatggaaagggaaaggccgcccgctttcatactggcgcttttttgagcggcaaagcaggagcatacgggcagaacgcccggaatggctctccggctgcgggggattatctgccaggaatgaaaatgaacgctgctaatgccacttaaggggattccattgtctcaacccagttttctgtttcccgggggacggctccgtgtagaaaaacgggtaagaacggaaaatggatgggtatggtccaatttttcctttctggcggaattccggaggggagcttcggcttgtaatgatcatcgcccctttgacggggttccactcgtaggaataaaccttgacgggagctccctgcgggacggcttctccgcgaacattcctggaaacctgggagactccgtattgggagatgatgaggttgttggaggaacggctgaaactcagcatgccgtccctggaactggtgatgctgttgatgttcccctggctgtttttggaaatctggacctgggaatcgtaggattgtttcgaaataacggccccggttttggtggtcatggaatggacgctaccggtggagagattcaacgtctgggaagaaccgtccggctggacaactttagcgaatgcggcgttgccagtggtgcaaatatcatcgcagggatcagaacaggattggcagggattgctttccttggtcggtggaacgctgctggagctggaggactcggagggacgcgcagttccgcgtggaggcccgttccgaatacgtggacgtgcgcgaacagattaccgtgaaagctgccctggggactacgcgcccggacaacaagaccgttttcctgatgtcctgcaaagaggcataggtacaaatgtgcgatagcataacgtgtccggatgtttgcctgtaaagtaaatatcatcaattattcagcaaatacaaaaaatccattattttacaaaatatccgacgttgtgctatcacacctcatgaatggccgagggagataacccactgcacttttttttctgtttatttctaccggaaaggttcatggcagccgccagccttccgggcattttccagggtggctgcaccatcatatcaatcaacaaattaaattaaaatcatgaatacccctgttactttacttgaagcggaatttcccctggacaaatgggaaggccaactgaaaggcgaccagcctcatttgaatgtggaagctcccgctcccgaaaagacgaccctttgggacggctacatcaaaattgaaaccgcaggctcttatgaaatcaaaatcggcgcggacgattatggttattttacgctgggaggccagacagccagcattgccgatccgggacaataccgggaatccgatcctgtcaccgtggaactggaagcgggatggcaccaggccttcctttcccacaccaacatcaactacaagccggaatccggcaacgtctcgcgcttcgactcctatctgaacggagtccaggtggagctctacgacatcgtgcccgcagaaaacaagccagtggtgtgcaagaagggatgtgacggcaaggaagtttgtgaggacccggacgcccccagcgggggaaccagccccagttcctccccatcttccgcccgcatgtcctcccggctggcccgttctacggtgtccggctcctccgcaggaacgaacgtggcggcggatgcctcccaggaaagcatgtactggcaatgcaacttcggtctgttccggggattgcccggcgtacccggaggccagattgaaatcgtggaggaggaatttacagaacgcctctggtccccctccgccctgttgttccgccatgcgctgcacagcaaattgctcaaacccacggaaggcttgagcaacaattgcatggtagctgttcagaaaggttccctgctggcctattacttcatcacccagggggaagaagacaacggcagcgtgggcaacatcggctacaacacgcgcctgaccaaccgcgcccggatgctgggagaagattttacaccggtcgtttccaatccggtttacattgaagtggcggaagccaatggcagcaaggtggtctattccgtggaaacgggagatcccgtgcgttttacggcatccagcggccagcagctcacgaaagcggattttcatgctttcatggatgtggtgtatgcggaagatggttccctgcggcaggtgagcaatatttcagacggccttgccagcgtgcaggacgtgacggaagagggctatacgctggccctgtaccttccttcccaggtaggagccaaggatgagacgacagggctttatgccgtgacgggagagccgttcaagcgctttgtttttgcccgcaatgaggaaggggacaaggcgagcgtgacggaaagaacgcccggaaggaatgattttgtcacaacctggtggaagaatggagaggtatggtgcctgggcaagggcacgggagactccgccattcatacggtcaggacacgcacagaggcctccgaaaaggaatggaacctgctgacggaagtgcggatgggggaagaaggaatggcggtttccagcctgatggagaactacaaatccaccccgcaaggcaatctgctgatgagcagaacggaaggttacggttccgacatggcccgcacgacttcttatgaatattccgccaacggggtcctgacgaaagaaacgcgtccggacggttccgaagtcaagtacgaacaggatcgtctgggtcgtcagactctcgtttccacaccgtataaaggctttgcggaaaagagagtgaagacgacctactgcgaagcgaagttcaacgaccacgatcccgcagaagtgaccaccatacttcggcaaaagaacaaggcggacgtgcagttgaaccagacgctttatacctatacggaagaaaacgacgtcaggcgcgtggaagaaaggacgaccgcgcttggggctgaaggaacgcggctggaagtgacggaaacatggctggcctccgcgcccaatccgtatgccaggggacgcctcaagatgcgccagggtattgacggcgtacagagggtttattcttacgaacttacaatctggcatggagcggcctataccgtgacggaggaaacgcaaatcgacggagcgcccgtaccggggcagagccgccgaatggtgtccttcatctcggcggaaggcaacacggtcaggacggaggaatacatcctgctgacggatggaacctggtcgttgctggacagcgccggctacgagtttgaccttcagaaccgctggatcaggaagacgcgcggcaacggacgaataacggaacgggaactgatgtgcgacgggcgtcccctatgggaaaaagacgaagacggcatcctgaccagctatggctatgacagcgcaaggcggttggtggaaatgatccgctctgcgacggagactacccctgaaaccatcatctcctataagagggatgccctggggcgtgtagttgaggagagaaaggacattggagccatgagcactgtgcgccggacggcttatgacgtgctggggcgcgtcagctccgagacggatgaactggaaagggttacggcctacgcctatagcgacgacgggttaacgacgacggcgacgcttccccatggagcaaccctgattcggacgactgcccctgacggtactcttctctaccagggagggacgggacagaaggaactgtcccacaggattgacatcattgaggatggcatccggaaagtaacattggaacctcagccagaaggagacccggtagcaacgttccgggaaatcaccaacggttatggggaaatcatccgcacggctacagccaacgccttgggcagtttctattacagccggttcacgtatgatgaacgggggtatcttgtcaagacggaggtggatgcgggaacgcctgctaccgccatggctccaaccttgaaggaatacgacgccttcggcaatgtaacgaaggaaacatggaagctggacgatcatcccgatgccaccaattcccgcatcacgatttattcctatgcggctgaacagggggatgatggcatctaccaaatcacgaccacgactatgaacaacagccagggaacaacctattcccttacggaaaaggttttgatttcctccctgtccgcaactttggaagacaaaacggtttctattgacccgagagggcaggaaactgctttctggacggagtatgccggagatgccaagcgaatcagcaagaacaaaatcccgggttgtgaaactgcggcaagctccctgatcgtggatggcatggctgtgtcccgtactgattatgctggagtaacgacaagtattgcccgcagctacacggaaacaggcattgttctcgcctctacggatgctcgtggtaatgtgacaacgactgtccaggacatcgccgggaggacagtcagcgtaacggatgctgcggggaatgccactacttacgcttatggggaaccgatcgactctcctacggtcattacggacgctttggggcatacttcctactacgcctatgatatgagagaaaggaagatcgtggaatggggaacgggcatccatcctgccgtctttgcctacgacaacgccgaccatctgatcagcatgcaaacgttccgggtgagcggggaaaccattacaaccgacccgcgggaacggactgatggcgacacgactacctggacttacgagaaggccagcggtcttttgctgcgcaagacctatgcggatgagactcatgagaatatatcttataacgttttcaatatgattacttcaaagatagatgcaagaaatgtgactgtttcttttatttatgatctcaaaaaaggagtaaatacttctattattgccgatgatggaactccaagcattacctatgcttataaccacttggcgcagatgacccgtgtgacggacgatgccggtaccagggactttacctacaaccagtacaatgaactggtgacggaaacgacgacgggactggctcaaagcgctttgactcaccaacgcgacagccagggcagggatgcgggctacagcctgcaatacagcaattccaccgtccagcagacggcgctgggttacgatactgccggaaggctctcaaccgtggaactcaacggaatggcaactccttttgcctatggctacaatgccaataacggcctgctggagacgctgaattatcccaatacgctgaagagatggtacacacgggaagaaaagcgggacctggttattaaagtggattatctgcgtccgggaggtcagaattatccagccaaggttgattacacctatgactccctggggcgtcccgtgacgaaaaaggattatttcaacacacccggtcccgatttgacacatgcctacacgtataatgaccgtggcgagctgactgccgatgccatgagccggggaggaacctacagctacgtctatgacaatatcggcaaccgggaaatgtcccgggaaggcacggctgttcccactgcctatgaaaccaatgaactcaaccagtatatttccattggagaaggagagcaggctgtgttcgttccggaacatgacgctgccgggaaccagacgaaaatcaggaccaccacgggagaatggaccgttgcctacaatgccttgaaccaggcggcgagtttcacgcaaggcggcaagcgcgtggaatgccgttacgactacatgggaaggcgagtggagaaatccgtttatgagggagaagatcttgtttcccgcaagtgcttcctgtaccgcaattacctgcaaattgcggaactggatgccaccgacacaacggaggaggcaacacccattctccgcaaaacctacctgtgggacccgatggaaccggaagccacgcgcattcttgccatgagcctgtttgatgaaacgggaacgtaccaggaagacttgtattacacgcatgacttcatgaaaaacacgatagccctgtttggcatccaggcaggaagaagagccttgtatgaatacgggccttatggtagtgtggccaagatggaaggtaatgcagccgagctgaatccgttccgcttttcaagcgagtattccgatgacgaattgggattggtctattataattacagatattatcatgccctctccgggcggtggctgacgaaagaccccatggaagaatatagtacgttgaatatgtacagatttctcaataacaatttgggaattgatcaacttggattaatcagcgtatctcaacaacagccgttccccagtgggcttcctcgcgtggaaggacctcctgaattgagttataaaagcatttcaaagaaggcaggcaagtgtgggcacttccgttgggatattcaatggattcttaagggaaaatcgagcccggatggagtaatatatcaggaagtcgaagccgaggtagagatgaagttttgcggggcagatcttgagccacaaaaaggaaaggaaaaacaaaaggaaagctggaacattggtggggggatgaaagatacatggtcatatcctaaaatgttttcttacgaggaacatcctacggaaggggaagttacttttaagggaacggcttactatacatcggaaaaacctggtatggcaaaacctcctacatggaagtatctaggagacgaggtggaacctctgtgtaaaggaggagtttgccttgccgatacatcccacaatggacttggaaaaaatccgacagcggattctaacaaagtgacaagaaccttgaaaatatcatggtgctgttgtgaatccaataaagataccaaatttgaatcatgagaatgttaccctctgcatgctgtattggagctctatatgctttgatttcctgtacccacaaaaatatcactcaagacgatattggtcatattgaaatcattcataatcaaatttatacagaattaaaggatgtttctttgcctggttataaatattattcctggccggattatccctccgacagtattcgggagatcagggagagggcgaaacgcctgaaacgaggaatggatgaacaacaggtggttgccctgatgcgtcctttagttgtaaatccgcctttgattccaggaaagtacagggatccggaggttgtaagaaaggagtttcattttaatgcctcttacaaagatttggtgaaaattaatgagtcattctatgatccaaaacgttctgatagattctccatcttaatgaaaattcctttttctaagaaaacagggaaactccggaaagatggacaggaacttgatttggaagtaatggtttttcccaattgggatgtctattatttgcccatttctgaaaaacgtcccatatatcaataaccaatatatataataaaagaaatgaagagccccgaaatatttcggggctcttttttgctcaatggcattttacctgttttcttatcatgcgacttttgatgccgaaaaatggcttgaaatgaaaaacgtgaagtagccttatgatagtgtaatcaggatggaaggtaatgcagtcgagctgagtccgttccgtttctcaagcgagtattctgatgacgatgtaggattggtctgttataattaccattatttcaatcctatggatggcagatggatcagtagatatcctattcaagagtctgatagctgaaatttgtatgaatttactaggaataatagtatttacatttctgattttttaggactgctgtttttgttctttctaccttcgatccgaatgatcctcaactaaatgggtcccaagtcaaaataactgataaagatataaaagctatagatgattttttagcggattttgatgcagtagatgaagatatgcggtaaaacttaagtaaaacactggtaaagagtggttggtcagtagatcagtaaaaaactcccagttcctgccttgatgaggttctccctttaggcagtaatttttgtgatctgatattatcaggagaccaagtttttatggatgattttccaaaagcgcataaagccctcatgaagaatccatattttattgtaaaaggctcccggatgttccgggagcctttttgtttttccattttcctgatggatttttcgggaaagaagcagtaggttgggaattgtttccctgcctctccatgaatatgcctcttcattgcctgctgctccagactccgggagaactcctggaaggtgaagaagacttcctccggctggggtatgccgtggaagcctttccgtccacacaggacgcctcctgcctggatgatgcggaaccggaagaacttccgctgcatgcctatgcccccggctggcgccatggcgacctgcctgtggttcgttccagccgtgcttctctggtccggatgcttgccgatccccgctggcagaaggaggatcatgcccgacaatgaaccggcacaagtccgcaggaacattcgccagacgcagaacagtaactgccgttgcgcgcagactgtggaaactcagaggggcaagtctccgcctgtttcctttcgctgctggaggattcttttcaatgtatccgaatttcttcagcagagcgttgaattcgatggaaagtttgctcgacgtatgatccgcctgcgcgtgatgcattgccgctaccggaaatacgtaatcgctcgcacagctggcaagccgtatgtccagaacttccttcaaaggcaagatgatgggcttgttcatgtgtttcttggttttttgggccgtcatcgaaatgcttccaccttccatgtcaatttgcttccattggagggtagcgatgtcgtccaaacgctggcctcctgtataaaggcagacgcgtatcatgtcgggccattcccccggcaggatttcggtcaatcgttgagcttcctcgactgtgaaagcgcgcctttcggtagcatcggcacggttgatcttgctgggacgcacccccttgaaaggattgtacggaaagagccgttcgttgactgcctgttgaaaggccgcattcaaaccgtataggtaaatgcttaccatcttggaactcagcaattccaaatatttttccatgaacctttgcgcctgggcctccgtcaccgtgtccaggggcatttcctgtttgggtcccagaaagtcgagaaaacaccggatagccttcccgtaacgaagtggtgttagcggttttgaatctgctatgcaccggaaagtcgatgtatagcacagtgcataacaaaaccatgtaataggactgaatatcacacaatctgctaccaagggaggccttgtaaaatgaggggtttacaataaacccgaaggcaaaaaatggagcggatgatgggattcgaacccacgacatcaaccttggcaaggttgcgctctacccctgagctacatccgctttggatgaccggagccttgcggcatccgtgtggcagaaaatatatagggttatccggatttggcaagatttttttagagaaaaattcatgttcaccggaatagggccatgctgccgtaccttttaaagaggactgatggttctgtggaaggagcggggaggacgggaaggtgccaggctgctttttccggttgttccggtttgacttcggggaaggcggcgttttgttgctctttcagttccgcggccgttttggctccatgttccagcaacagtttttccttggcggcgtcatggcggttcctggcgtgggccggcatggaaatcgttcccctatgtacggcattgacgttggctccctgttccagataaaattaacctgctccgtattgccgcggcagatggtattcttgagcgccgtatcttcgttaaccgatcgtttgcagtgtggttccgtaggtttcagcagttgctgggcctggagcgtgcggatgacggtaaaggcgtacggggtgaattcatccggctccggggccaggcggttttccgccacggcgcggacgagccgcttgacgttttccgccagcaggccttccgagtccaggccggtctgcgctttcaaccgggcgaaggccagcaggttgtcccttctgtcccgccatcaggagacgcaatcctccagaggatgactgtggtcggcatctcggggtggtcttaaccggaagagcatgtatttatcccttataacggcggaatggcgtcggtgtccgaaatgaagcggtttttgcggaaagaatgtgtaaaatcttgaagaactccctgtttccataaaaaacggggctgttccggaaggcgcgttttccgtgccctggaacagtcccgtgaagagagggagtcaatggggaaattagtagcttctggcccagaggacgcggcgtttcgtcatgcggcccgtgaggatgcagggagcgggttccccgcggcccagttcgccaaggggaatgcagcggatagagatgcggaggcgcttggcgagttcctcttcctcttccggtgagccgtcccacggcacctggagccagtcggtgtcgccttctccggtaaagttttcttccagttcccggagggtggaggcggggcggatgtgggcgtcccggaaggcgatggcccgttgaagcagggtgtcctggatgttctggagaatgtccgtgacggtatcaaccagttccgtttccgggacgaaggatttttcattgacgggcaggtcgcgccgctggaggcagacggagcctttttccagatcccgggggccgatttccaggcgcacgggcactcccttcttcacccattcccatttcttggcgccgccgcccaggtcgcgcctgtccaccagtacgcggagcggctggccgtggaaattcttggcgcggagggtgttcgccagttcctcgcagtggtccaggatggcctggcggctttcttccctgggcgtgacggggatgatgacgacctgctggggggcgacgcggggcgggcataccaggccgtcgtcgtcggagtgcatcatgatgagcgccccgatcatgcgggtggaaacgccccaggagctcgtccaggcgaactgctgggtgttgtccctcccggcaaagcagatgttctgggatttggagaagttctgccccaggaagtgggaggttccggcctggatggccttgcggtcctgcaccatggcttccaccgtgtaggtctgttccgcgccggggaagcgttccgcctccgtcttttctccggggatggtgggaatggccagaacgtccctctggaagtcctcgtaaaccttgtgcatggtgagggtttcctcaatggcctcctcccgggtttcatgggccgtgtggccttcctgccacaggaattcggccgtgcgcaggaagatgcggggcctcatttcccagcgcatcacgttgcaccactggttcaccttgaggggcaggtcgcggtagctggaggtccagcgggcgaaggccgcgccgatgacggtttccgaggtggggcggatgacgaagggctccgtgagctccccggtgggaatcatgcgggtctttccggtggcttcatctttctgcgcttccagcctgtggtgcgtgaccacggcgcattccgtggcgaagccttcggcgtgctccgcttccttctccagataggaaatcggaatcaggagggggaagtaggcgttcgtgtggccggtgtccttgaagcgctggtccaggtccttctggatgagttcccagatggcgtagccccacggcttgatgaccatgcagccgcgcacctcggaattctccgccatgtcggcggccttgatgacttgctggtaccactcgggaaagtcctgggcgcgggtgggggtgattgcagtttgttgagacatattggatggtatgttgaatggagcgggcgcggcccgcaaaggaagctcggaatattaaaagggggcgtttctgtattcccggtaattgctgtaggcgaagagggccatgaatatgggaatgaagtagccgtggaagagctggaaactgagcagcccgatgaggatggacgtgatgaacccggtcatgaacactttcctgggggagcggatgaactgggcgatcagctggccgccgtccaggggatagatgggcagcaggttcaggatcgtccaccattccccgatcatgatgaggcaggagaggatgtaaagctggggggagatggccgccgccgtgaaggggctgatggccaggtcccagaaggtcaggttgtgcgcggtcatgaccggagcgacgatgttccaggtaatccacaggctgatgatgcccagcagcagggtcatcatggggcccgccagaatcatgagggccctccctccgcgcgtcaattgcatgccgtggctgctcgtcagtccgccgaagagttccaggacgatcgtctgctggccgccgcccagcctgcggcccaccagcgcgtgccccatttcatgggacaggatggcgacgaagccggcaatgacgaacagggccggataaatgaggccttccacactgttgatgctgagagcgccgccgaagatggccagcaccacccagaagctggggcggatgtaaacaggtatcccgaacagggtgaaatgaatcatgcgcgagagggtaagggcagattccccttttgccaagcccggagaatgtgcatgcaccgttttggcgttggtgcggtgcaggggattgtgttaaaaggccttcatgaggctgtttcccatcatcctgtgctgtgccgttcaggctgtacaggggtatgacggaccccctcccctgacggaggtggacggccgttcccccatccgcatgggggggaattgctgggcggctaccgttcggactacatccaccgcggggagaagctgggccccaattccgtggaaggccagatttccggcggggcctccctgtcggactcatgggcggtcagcggggaactcttcgccatccgcaactggcaggggcgcaatttcagccagaccaccctgcacggggagcttcaatattatctggcggacgagtgcacggccggactgtttgtcaacgggcagtggtatgattcctgccccctgaaaaccggggtggagcccggcctgtccctcaagtggaaccccatgccgtcctggtcgttcagcggctccttcctgtatgattccgggcaggagggggtgtactcccagtggggcgttacctggcagcccctgctgtgtgaatccgtcgccatggtgaatacggtttccctgggtttttcccatgattacttggggagaaacggcttgaaggaactgatggtgcgcacgggcgcgcggtgggccgtttccggcagtctgcggttggagcctttcctgggatggtattgcggctacgggcgtgacgatttcaaaaaagtggtgctgggcctttggtgctcttacgttttttaacgggcggatttctccggttttccggcattttccagttgccaaacggggaggcttggtcataatggcctgcgtattatgaagcctacacttcttgttttagcagctggtatgggtagccgttacggcggtctcaagcaacttgacccgatgggtcccaacggtgaagtcgttctcgattactctgtttatgatgccatccgggccggtttcggaaaagtggtattcattatccgccgtgactttgaagatattttcaaggaaaaggtcggcagccgctttgccggcaagattgaggtggattacgccttccagtccctggacgacctgcctgaaggcttttccgtgccggaaggccgtgaaaagccctggggcaccgcccatgccctgcgcgccgcccgccaggtggtgaaggaaccctttgccgtggtgaacgcggatgacttttacggcgcggacgcctttgtgcaggccgccaagttcctgacctccaccacggatgaacccggaaaggcccattacggcatgatcggctatccgttgaagaacaccctctccgacaacggggacgtgaaccgcggcatctgctccatcaaggaaggcctgctggacggggtggaggaattcgtgaaaatccaggctgatgaagacggcgtggtgcgcggcaacaacctgaaaggcgaacgcctgcccgtggaccccggcgaactggtttccatgaatttctggctcttctccccctccttcatcgatctgacggaagaccgtttcattgacttcctgaaggaacacggccaggagcccaagagcgaatgcttcattcccaccgtggtggacgccctgattcatgaagaccgcgcggactgcgccgttcttcccacctcctccacctggttcggtatgacctatcccggggacaagcccatggtcgtggaaggcatcaacaaactcatcaagcagggcgtataccctgaaaagctcaactaagcctcttttcccatgcacgatctcaaggctgtatcatccctgttcgatctccggggcgacttcgtccacggttactcctacggcagtggccacatcaacgacacctactgcatctgggtggaccaggcgggccagcgcatccgctacatcctccagcgcgtgaaccataacgtgttcaagcagcccatccccctgatggaaaacgtgaagcgcgtgacggaccacgccctgaagcgcctgaaggaggaggactgcccggaagcctaccgccgcaccctcacgctggttccctccgtggacggcaagccgtacgccctggatgcggacggcaactgctggcgcgtgtacccgttcattgaacgcgcacgcacctatgaccagattgaaaccaccaagcagtgccaggaagcggcgcgtgccttcggcgagttccagaaactcacggcggacctgcccggagaacccctgtttgaaaccatccccgatttccacaataccacttcccgcctggaggccctgaaaaaggccatccagtccgaccccctgggccgcgtgaaggaagtgcagaaggaaatagactggtacctggcccgtgaagcggactgccatctggtggtggattacctgaaatccggcgaactgcccctgcgttgcacgcacaacgacaccaagctgaacaacgtgatgctggacgacgtgaccggggaaggcatctgcgtgatcgacctggacaccacgatgcccggttccgccatttacgacttcggggacatgatccgcacggctacgtcccccgccgcggaagatgaaaaggacatctccaaggtcacgatgcgcatgttcatgtttgaggcgctggtgcagggttacctgagctccgccaagagcttcctgacgcctctggaaaagagcctgctgccgttctccggcaagctgctcacgatggaatgcggcatccgcttcctgacggactacctgtccggagacgtgtacttcaagatccaccgcccggaacacaacctggaccgctgccgcacgcagatggccctggtggaatccatcgaggcgcagatggatgaaatgaaggccgttgtggaccgctactaaccaatacctaccaacatcggaaaaacacatgaagattctcgtaaccggcggcgccggattcatcggttcccacattgtggaacactatcaggacaaggcggaggaaatccgcgtgctggacaacctgcgcacgggctacctcaagaacctggacgggctcaggcacaccttcattgaaggctccatctgcgaccgcgaactggtgcgccaggcggtgcagggcgtggactacatcttccacatggccgcgctcgtctccgtgccggaatccatgagcaagatcagcgaatgcattgacatcaacgtcaacggccttctgaacgtgctggaggaagcctccgccgccggggtcaagaaaatcgttctggcgtcttccgccgccatctatggtgacaaccccaccgtgcccaagctggaaaccatgtacccggaacccaagagcccctatgccatcaccaagctggacggggaatactacctcaacatgttccgggcggaaggcaaggtcaacacggccgccgtgcgcttcttcaacgtcttcggcccccggcaggaccccaagggggcctatgccgccgcggtgcccattttcattgaaaaagccgtcaagggagaagacatcaccgtgtacggcgacggcacccagacgcgcgacttcatttacgtgaaggacatcgtgggggccctcaccttcgtggcggagcatccggaagtcaccggcgtgttcaatgccgggtacggcggccagatcaccattgaagaactggcggacaacatcatcaaggccgcgggttcctcctccaaggtgctccatgccccggaacgcgccggcgacgtgaagcattcccgcgcctgtgcggacaagctccggagcgccggatggcagcccaaacacaccctgccggaaggcctggcgactacgctggaatatttcaagggcatcctgggcaagtaactttccggaacctccgggttcatcatcattcagggactgtctccgctcctgcggcggagacagtcttttttcatgccggaatggctcatgtatgacaaattccgccgatgctatcatctgaatcattcaaaaagacattttgccataacgggaatggcagaagcgcagcattccgataggaatgaaaattcattcatcatcaagcaggtttcctggaatgaggcaatactttgcagctacaataagatgattggcggaagttgatatttcgtatttgttagagaaaaagatttcttacaggaaggtcgggcgccgggattgaatatcattgacagaaggaagggttaataatagagaccaaaaacgatatgcatcccttcagaagtacttctgccaatcatctagctgcgtttaatgatccctctcttgaactggtcatggcccgccggaaggaggaagcccgctgggggtggataccttttgccgcattcgtctcctttttattcgtgtaccgtatcttcggcttgttcatgccgagcaatgatgcggacggctcggaaccctggcttttcgtgctggcgctggcaggctgggggcttctggcgctcatccacatgattgtgcttcccatctggatgctgatcgcctccctccgttactgggaggtgaaccgcaggatgctggcggtgacggggcttctgttcagtgttcttgcccctgtctgcatggttctgatgctgtcctgctggtccgtgtccggttgaagctgggcttgaccgttctactggacgccgcgggaaaggggcattctgcggcgtgagtccggttgccgcgggctctcctggctgatggccgtttggcggggcgggtaatttcttctcccctctttttcctcctctttctgcggggagggtacggcgttccctccgtgaaacttgccggattccggggattggccttttctccggccttcccagcgggtaaagtgcctttaatggatctgttcagtttacaggaagcggacgcgagagaaggcttcgagcctggagcggatatgtccgccatgcccctggccgcgcgcatgcgtccgcgcaccctggatgaagtggcggggcagaagcacctgctggcgccgggaaaactgctgaggcgcgcgattgaaacggaccgatttacttccctgattttttacgggcctcccggctgtggaaagaccaccttggccgctgtcattgcacagacgacgaacgcccatttcatgatgctcaacggtgtggaatccaacgtggcggacatccgggagaaaatcgcccaggcgcagatgaggatgagcatgcacgggcggaaaaccgtcctcttcgtggatgagctgcaccggttcaacaaggcgcagcaggatgtcctgctcccccatctggaaaagggaacggtcaggttcatcggcgcgacgacggagaacccctactttgcgatcaactcccccctgctgtcccgctcccaggttttcccgctggaacccgtgccggaagaggagctggccgccctgctgaaacgtgccctggcggatgcggaacgcggcctgggagcgttgcgcgtggacatggaggaggaagccctgaaccatctggccgctaaggcggacggagacgcccggaaggccatcacggctctggaagtggccgttctgtccactcctgcaggggaagacggcgttatccatgtgaacctctccgtggcggaggaatccatccagcgcaaggccatcaagtacgaccgcctgggtgactcccattacgacacgatttccgccttcatcaagtccatgcgcggctctgatcctgacgccgccctgtactggctggggatgatgctggaagccggggaggacatccgcttcatcgggagaaggctggtcatcgccgcgtcggaagatgtggggctggcggactccaacgccctgcgcgtggcgctggacgcggcgcgcgcggcggaaatggtaggcatgccggaggcccgcatcccgctggcgcacgccaccgtttacctggctacggcccccaagagcaattccgcctacatgggcatcaatgccgccatggatgacgtgcgcaacggaaaaacgctggccgtgccggagcacctccggacgcccacgcgcaagaagctggccgccgccggcggtgcggacgccgccaggctggaatacctgtattcccatgattacccggaacattacgtcccccaggcctacctgccggaaggccgcgtttactacacccccaccggaaacgggctggaactgcgcatcaaggagcgcatggaataccgccgcaagctggcggaggaaggcggcaaaaagggctgaacagggcgcttcccttgtccaagctgacggcgccagcatgccggcagatgcacgggccgcctctcaattcgttttgatttttccgggaatgcggctccattcgtcgacaaagaaggaaggaaacgcttgcgccagctcctgcatgggagcgggcaatcactttttccaggaaaaaggggaaggcaggaattcccgcgggaacatcctgcctttttgaaggtttttgatagggaggaggcttgtgcgcctccgctttccggaaggaatcagggttccttggttacgatgatgtcgcagtccgcgtcaaaccagccctggccctggcagtcgaagaccaggtccggtttttcggaaccggagaggcgcagggtgaattcccgcccgtttttgtcctgctggtccttgggcagttcgctgaccacgcggctgcccctcatgaagcggggattgcggatgttgcagccgccgctgttcatcttgaaggtgatcttgtagttgccggggccgttgagcatgctgccgatgttgacgcgggtgggcgtaaattccgggcgcaggtcatagcccgtaaagcgcggctccttgagggtgacgggttccgtcaggaagcggtagtagttctgcgcgcctgttcccatcagggtcttgggggagattttggcgatgtccgccagggtcttcagcgcctggtcctttttcccctcgctgcggtagagccagaatctggccgccatgacctgctgtttttgcaggggcgtcaggccggggattttgagctgcttgtccacataggcatgggcggccttgtagtctttctgcccgccgtttttgccggagtcttccaccatccgctgcaccttttcaatgtagggcaggtgcttgaaggtgtatttgaagtgcatgcccctggtgtcttccgggtccgccttcttgattttttccagaatgtccttcctggcggaggccgcgtacgggggaagctgctggaggccttccccgtagagaagggccgcgttcgggccggaagaggcgtccgccttttcccacagggcattggccttttcctgctgcttcacggcttccagcgcctgcttcatgacggcgggcagcgtttccttggaaacgccttcggacatgaagaccatgccgccggcgggggaaaccacctggatggccgggatgttccagatttcaccgggaggcttgggcagcttcttttcctcttccgtcatttcctcccgttcatcctggatgcaccagaggacgggttccggggagtccttggccaggtgctccacggcgcgggtgacttcgcgcgatttgggggaccagtccgtgccggcccacacgacgatcatgtatttgttgacggttttggcctcgtccttcacggcgctgtaggccgggagggccgcctggacgggcgcggacaggaggagggctgcggccagcaggccgggaacgatgttgagatgatgaaacatggcgttaatggaaaagggtgcaggggttatttttcgtaaacgaggatgtggcgcaggtgcatgaattccggctgggcgttcttggcttccaccttgatccacttggccttggtgccttccggagcggtgatgacccattccttgggcatgttttccgtggcggccagggggaaccaggtggctccgtccgtggaggtggagacctccatcttcttcatccggtcttcattgccgttgcgcttggtgaccaccagcccggccaggttcacgccgtttttcagttccacaatgacgttggggttcgtttccttgttcgtatgctgggagccgccgcaggggcgcagcaggttgatgtggtcccacgggctgtcccactggcaggtggtggagcacctgaccatgccgtccgcgggcaccagcttccagccctgggggatggcggcattgaccgtgttggcagacgtatcggcgtcagagaaggaggcggccgccttgctcagggtttggaaggccggaatggagcgggccatttccgtggcatagatggctttgccgtaggcttccttcagcttcttgggatcgggagcttttccggaggctccggcttcccccgtctgctgggctaccttggcgaaggcgttggagaagacgtccgcctggccgttttccacaaaggttttcacggcccattccagcgcctggccgaagttggtgccgtcccccgttttcaggtgcgtggagagaaccgtttccagataggccgccttttcctgcggattggtcaggaaggcggactgggagtccagcacgggctggaatttgaccgcccaggaggtgggggtggtggcgatggtttcatgcaggtcccggaaccaggcgatccggtcttcggacgggatgtccatcaggaacttgttctgcacgtccttcaggatgtcgaacgcggcaaagccgttccccttgtagtgggagagggcgtccttggcgtacacgtaccagtcgatgggctgcatgccttccttttccatcagcaggcgctgaagctccgtgcggaagaacgggtgcagcggggtttgcttgagcgcttccccccaggcctggatggctttgtccttgttgccggcggcttcgtccaggcgggcctgcgcggcccacaggtaggcttggtccgccttggcgttgtccgcaaagacgttttccatcagcaggtaggaggttggagcctggccgccgaagatgtggttgtgcatgcctccgtccggtccgccgaagccgcctttccattccccgcgcttcacgcgcaccgcataggcgcagtggccgggctgccccaccgggtaggccgggatgccgtgggcttgggcggccatggtgccgaagtaggagaggccgccgcagacgccgccgatgacttgcgtgttttccgcggaggtgttgacgtcgcgccacggcacgtagaagagggggccctggatggtgtcgccgaagaagttgtttcccgtgtagggggcggcccagcaggcgtccgtatagcgccgccaggggaggttgacgtgctcattgctccattcgtaggatttgtcgtcccacgtatggcccacgacgaaacgcatttcccacgggcgcagcttgatgaagccgggatgcagcttgttttcctgatgcagtttcttgaatatctggtaacggcgcactgggttgctgttggcggagttggttttcagttttcccgccatggggcctgtggaaaagacggaggcaagtccggtggcgagggattggtagtcccggaagtccgcactcctgccgtccgctttccagaggtcggaaagaatttgaaggccctccggggagttttccggaatcaggcccgcgcccaggtagagttccatccatgccgggtcctgtaaaaaggccttgatgaaggccgcgtcctgcgggcttttggagaaaacggccttcacgttgtccggtcccgtgacgcgcaggagctcgtgaatgtccagcaggtggcggtattgcttgtcctgaagcagtttttgctccgatttggtttgttctccagccttcaggagggaggagcggagttccgtttgcagcccggcaaagtcgcccgcggctattttctgcgccaggggggcaggaagctggctggcggcggacggcgtttccgtttcaggttccgtcagatcctgcgccatgcagacgggcgcggcgagcagggcggtgcagagaagaagatgtgaaatattcatgtggaaaagcttgtttaaggatagcagaagaaggggggaggaagccagtgcgttttccgacttattacgatgccggaacagtgtttttatcatccgccgcgaggcatttttcagcacaaatggtcgcagagcattttgacgcccaggccgatgaggatgagcccggcccccgcttccaggtggaacgtggggaagcggtgcagccgccgggtcaggaagaagcctgccgccgtgcacaggaaggtggtgaagccgatggcagctgcgggaagaagaacggcgtggagggtgggggtggtgccgcactgggcggaggagagatagatgctgacgcccgccaccagcgcgtctatgctggtggcaattcccacggccagaagagtgggcagcgtcaggctggtgacgtggggcatctgctcttcttcgttgcggtggttccagccttcccggatgacgttgacccccaggaaggtgaagacgacaaagcccagccagtggtcccaggccgcaatgtactggtgcacggttcccgtgagcaggaagccaagcacgggcatcaggaattgtcccgccccggtggagagggaaagcttgattccgttgctcaaacgtttttgcttaatgagcaagccgtaggagaacgccacgacgaaggcgtctacggagagggcaaaagccaggaataacaagtcggcaagcggcatgctcattgcggagaggcactctaggacatccccgggaaaaagcaatttttttgttccacgcggttttttccgggttccgggtgcatgggagagagaagaatcggcacgttccccatgagggactgcccaaatgcatggaagtctgttgtagagagacttttccgtttttcgtcaggagattcgcctatgcaatattactcttttcaaatgcaaaaactgctgaataacagcctttgcgtaatcgggggatcagttaatttggcgttggcggtttcttttacgcccaagtgcagtaattcaacggaatagcgattgtcatgaagaagataatgagaatgggaaaattcgtggtgttctctgtttttagaatttccccttgatagataaaaattttgtttattcattaatttactcaacgtcaatattttagattacttgcatattttcttgcttaagaaaatgaatgagacggtaaaaagtaatgcggcaatagatgaaaatataatagaaaatgtgctatggaaccattcatcaaaacacagttctctaagtccggaacatacacataatacgttgaagatagctacactaacgagaataaatttcattttcaaagggtattaagcgaagtaatttaatcctgaggagtgaaattctcaagcataaaggcctgaaaatgtttctgcaggagccgtaaatttcccccaatgatattcccggcgctacggctccataaactgaatgctggaagagggacatttcttccgtccgtcatgcggtgaagaagaaaggagaggattacttgcagtattttttcatgtagggcagcacggcgtttgcccagatggcataacccttttccgtaaagtgcaggttgtccctgctgatgccgggcaggagctttcctgaggggtccagaaagcgcttgctgatgttggcgtaggtggtgcggggcagtttgcactgggccaggacggcattgattttgtcattgtgctggcgcagcttgtcctccggccccgtgccgcgcgggaaaatgcccagcagcagaacgtgggtgtccgggaacctgaccagcaggtgctgaacggctcccagaatgcccatggccgttttttccggagcttctcctcccttgaaatggccggtgttgttggtgccgatcatgacgatgcagagtttgggttccgtctgggccggaatgccggagtccgtgatgcggtagatcaggttggtggtctggtccccggaaatgccgaagttgcagggatggtagggtttgaacgccttttcccatacttgctttccttctcttttccagtagtccgtgatggagtctcccaggaaaaggacgccgcaggggttgttttttacctgttccacctgctgttcatactgctgcctccaccactggggctgttccctgggcaccggggccaggggtgacggagattccgcggaagatgccggcatgggaagggtggccagcagggagaaggcaagtgcatgcagggttttcatttacctcattatacgggcggttttcaaaaacgttacaggaaagttgtggtctttttccgctcctgcggtacgcgggcagctcttgcggcagggcgttcccccttgccagattccggagggtggtgtagcttgtgacggtatgagtgaggtgtccctgcagcatggaatggcgcgccagatggccgcctcccagtccatgcaggccgggatgcagattctccaggcctccgctctggaattgaagcagcttctccgccacgcgctggagaccaatcccatgcttgaggaattgccggacgcttctccggaagccctggaggacggtccggacggagacgcctggaatgagcgggaggacggctggaacgagtttacggcggaaggccgcccatccgcggaggctgccgcccgccgcgatttcatgtatgagtctatcgtggctccggagtccctgaaaacccatttgacggcccaggcgcagcattccgcgctgaccgggcgcgcccgggacgccctgttcctgctgattgacgccctggacgaccgcggcttcctgacggagtccccgcaggagctggaggaacgggagtgtttcagcatgcgggacatgcaggaagccctggccgtgctgagggggatggaccctcccggcgtgggggcggcggatttgagggattccctgctgattcagcttgagcagcgcagcctgaagcgttcgctcgccttccgcctggtcaagcgctgctggcgggagctggcggcgcacaagtatgaggaggccgcgcgcctgctggacgtggagccggaggccgtggcggaggcccttgaagttatccgcagcctgacgccggatcccggctgcgcctatgctcccggcggcaatccccatctgctgcctgacgtcatcgtggaggaggggccttccggggttctggatgtagtcctcacttccgagtacctgccgcgcctgtccatgaatgaacggtacatggagctgatggcggagagctccggcagccgggagctccggcagtatctccgcaaggcattccgggaagggcaggaactgctgcgcgccctggacatgaggcaggagaccgtgctgcgcctggctcgcgccatcgtgcggcggcaggaggattttttcaggttcgggccgtcccggctgaaggccatgggcatggaggaggtagcggaggaaatgggggtgcacgtgtccacggtttcccgtgcgtgccgggacaagtacctgctgtgcaagtgggggatgaaggaactgagaagctttttcagcgcgggcgttccggcggaaggggatatttcttctgcgggaacgggcgcggaggcgatggcttccggagccgttcaggagttgatgcggcggttgattgcggaggaagattcttccaaacccctcagtgacgccaggctggccgccgcgctgcaggagaagggggtgaacatcgcccgcagaacggtggccaagtaccgggagcagatgaagattctgcccgcgtccctgcgccgggggatatgacagtttcctatatttttaaataatttattgatattttatattcaatgaattatgtattcatttacaggggcgttccctttgtttttatttccggcggaagaggcggttgactgatgcggctttggtgctatagtccccgctttatcgtgatgcgtacatttacctggcctattgccctgctgctggcggggcttctttttcagacggtggcgtttgccgttctgaatacggtggttccgctgtggatggaacagtctgacgccgccacctgggaggccgggctggtgggggcttttttctttctggggaacctggccggcacgctgatggccggaggggtgatccgcaagaccgggttcaagggtagctaccagtacgcgtgcatgttatgcgcggcgtccacgctgctgctgcttgtgtttcccggcgcgctggcctggagcggcctccggctgctgacggggataagctgcgccctggtctgggtggtggtggaaagcgccctgctgagggccggaacgctgcaaacccgtggtattcttctggcatcctacctggtggtttattatctgggaacggtgctgggccagctcctcctgggctggttccccagcgacatgtccctggtggtgacggaggtgtgccttctatccgcggcagccatggttcccctgatgtttgcccgtctggaatctgattccgcgggcgccctgtcctccgtgcatgtggaggtacggacgctgctgaaacgccgcagcgtattcctgggcgtggtggggtgcgtgatttccggcgtggtgctgggaacgatttattgcctgatgcccctgttcctgaaacaccagggcatggaccattcctccgtggggtactggatggccctgctgattgccgcggccattctgggccagtggcccatgggacggctggcggacaagtacgggcgcgccttcgtcatgaaatgccagtccctgctggtggtggccgcctgcgccgggctggtgctgaaaggcggcctgatggccccctccctgattgcgctggggctggccgggttttccctgtaccccgtcgccatggcctgggggtgtgaagaggcctcacgggatgagctggtgaccatgaaccagcttctgctgctgagctactccattggcacgctggccgggccttccctgacctccttcctgatgcagcggtattccgataactggatgccgatggtcattgcgctggtggcgctctccttcatgcccgtgctgatgctgggcgccggccacggaagaagaaagctgtcccggtaaaagaagagggggagaaagaggcgtcagggttttttctggtccgccgcggcgtttttctccggtttgggcacgtcattgtccgccacctggtgaatcatgtccgtcagggcgtgcacatagtcctccgtatgggaatccgtaatggcgtacttgcacaggcatgagaccgtggggatgcccagcgccgcgtaatggcggtcattgcccgcaatggcggagggctcccggtggaaggtggggggagcctgctcccaggatttggtgaagggagtggcgcactggcccgcgaattccttgccgcggagcgtggtcatgaacagcacggcttcctgcggggattccggttccggctgtttctgctccgcagcggcggccagttcctgcggttccaggttgatcatgcccaggatgttggccgcgccgatgctgccgctcagggttttggcgtggacggaggctcctgaagaggcggatgcgagttccgctccgttcgcatacgcgacgaagtaaatgttgtggttggtgggaatgtccttgaggcccctggccgtttccagcagcagggccgctccgctgccgttgttgagccgttcactggaatcgtaattggcccccaccacgatgctctggttgttggaatacagtccgggcttgtaaaccaggacgttgtagatggcggtcccctttttcgcatcccctccggaaacgggctgcaaggtgacggcataacccatgtccgagaagcttccggcgatgtatttggcggcggcttccatggatttgggctgccgggcgtttctgggcccgatgtctttttgcaggacttccgtatgcttttccatgcgcgcgcccagactccgcggcgtatccgggccgccggaggaggaagcgggaaggagggtgcaggaggagaggccggaggccagcagcaggaatccggcggtcagggcggcgtgtttgtgaatgcgggtcatgtcttacagggtttcaacgtaatgcagttcacgggcaatctgagcggccaggggaattttcagatggtccggcaggacgctccacgtataggtttccacctccaggtgggggttcaggcccggatggctgcggaggaaggcgtgcgttttcaggatgaaatcctccgtgccccgcaggggcggttccggggaggcgtacaggggaatgtggtaatgaatgcgccattgggaatcccgcgtttcttccgcgtagtcccgcccgtaggccagggcgttcggcaggtccgggaaaagcatggttctgccccggtggaggatgctggtctggtggaaataaacgccgtcgtcaaactggcggaggcgttccaggtcttcctccccgcgtatgcggcattccagggcgttggagaactgcaccttgcagagggagatgttgttttcctcccaggcggagagggtgtctgccggttcctcccgcaggatggcgaagtggcaggtgtcatacgtcagtcccagatggcgttcaatgagttcggggcggcgggagtggttgcgcaggccgttgaaaaagcggatggtgccctccgtatcgtggaaatggccgaagggctccggctccagcccaagctgcatcaggcgtccggtctgcctgctcagcacgtccaggaatccgctcatggcgtccaagcgggagaacatgcgctcctcctccgcatggaaccagctgtgggaggcggggagcgtgctgacggtcagtctgtccgcccgttcatccccgatgcgggccaggatgcggaacaggttgcaggtgtattcaaaacgttccggcgtggtccagtccggctggaaaacgtgttccttcacccgctggccgtgaaagttcccgtagggaaagccgttgagggtttccacgcgcgcgttgtgttcgtccagccatgatttcagggcttccacggcgtgcggcgtttccagcagttccgctgccgccctggcggacaggcgcaggccgatgcccagggggcggtccttcaggggggaattcagtgcggccagttcctgccggatgcggggaacgtgggtctggagggcttcccgggtttccgcccaggattcggcgggatggatgttggtgcagtaggaaagcatggcggggcagtatgtgctggtttggggaacggcgttccactccgggggaaaatggtggaaaatgcgtgcgcatgggacgttcctcaagcctacatacggttccgcagtgaggaaaaatttcatggaattgcggcttttggcgtcatccggaagcgtcctttccggcggaaagaatggctttgaaaaggctccggatatatggtagtatctttccgtaatgcgtccgttcttctttctccttcttggtgttctgttccacggggatgtcctgcgcgcggcggaggaatcaacggcctggaaatcctccctgatccggttcagccgtccggcggaatggaaggagacgcgcccccagaagggaaccggggacaactcctgggcgaaggacgccacgccgatcggcaacggaagaataggagcgctcatttacggaggcgtggaaaaggaccgcctggagctgacggaaatcagcatgtggtccggaggtttttgcagtgcggaagccaaggacaaggggccggattccgtcaaattcggatcctaccagccgttcggcacgctggaaatcacgtatccggcagcagagaacgtgcaggattatacaaggacgctggatgtggcggaggcgctggcctccgtgtcctacaactccgggggagtccgttaccggagggagtatttcgccagcgttccgcaccaggtggtttccatgacggtgcagggggacaggccccgttccgtggaagcctccttccgcctggcgaccttgcatcctcaggacaggattacggccacggccggagggggcaggggaatgattctgatgcagggttccctgaagaacggattgacctatgaggcgcgcattgccgttcttcccaggggtggaaaagtcacggctaacggcggctccatcaccgtccggcaggctgattcctgccgcgtgctggtttccctggctacggattacgtgctggacgcttcccggaactggaagggggagccgccccgcaagaggaatgaagccgttctggcccgtgcgctcaaggcggctccggagcagctgaaagccgcccaccggggcgcctacggcaagctttacaaccgcgtttccctggacctgggagagacggaggacgccacggcggaactccccgtcaacgagaggctgaagagatacaggcaggcggtggacgccggaagggacgcccgtgatcccgatctggaggaactggtgttcaacttcggccgctacgtcatcctttcctcctcccagccggggaatctgcccgccaacctccagggcctgtggaattacagcctgattccgccgtgggattccgactaccacaacaatatcaacatccagatgtgctactggggagtgctcccctccaacctggcggaatgttatgacccgctggtggattacatccgggaaatggcgcccgccgcgcgtaaaatcacccgggaggagaaagagttcaggacggcgggcggcaagcccgctccgggctggacggccaggacggcccagaacatttacgggggccagggatttaaatggaacaagcccgcttccgcgtggtatgccctgcatctgtgggaacgctacctgttcacgatggacagggagtatctgaaaacgacggcttacccgatgatgaaggaaatctgccgtttctgggaaagccagctcaagcccctgcacgcgggaggaagcaatttccggacggaggacaggaaggtgacgccggaaataatctcccgggagttgaaggacgtgaaggaaggaacgctggtggctccgatgggctggtccccggaacacggccccagggaggacggctgcgcgcatgaccagcagatcgtgtgggaattgttcaatgataccgtacaggccgcggaaaccctgggcgtggacattgcctggaggaaggaactggccgccaagagagaccttctggccggtcccagggtgggggaggacggcctgctgctggaatggatgatcgcccgcaagccgggcggctcctgggacccgcgccaccggcacacctcccacctgtttgccgtttatcccggcagccggatcagcccggaaaagacgccggaatgggcggaagccgcccgcaaatccctgctggcgcgcggaaccacgggggattcccgccgttcctggacctgggcgtggcgcgccagcctctgggcgcgttttctggacggggaaaaggcttatgagatgattcggggcatgatgcgccacagcatgatggacagcctgttcaccacgcatccgcccatgcaggtggacgggaccatgggcatcgtggccggctttgctgaaatgttgctccagtcccgcaccggtcgcctgcatcttctgccggccctgccggaagcctggaaaaacgggagcgtgcgcggactgaaagcccgcggcaacattaccgtggacatggactggaaggacggcagggtaacgcagttccgcctttcctccccggtggcgcaatccgtccgggtggccgccaatggcacggaaaagacgtatgaactgacgccggagacgcccgtcaggggcagttgaggaatcttcagaacggttcaggaccgatgtctctcacgccgttacagctgtttttcagcaggtacagccttgtttctgttgtaatgcgccccatttgccaagggagtaatgcgcccgctgatgcccggatgaacaaaagggcttgtgcctgcaacgggaagtcggggcacggaatgagtttttgacatttccgcaggcggatattaaaattagtagaatggaagatgcgcctttgaatacggattttatcaatttaacggcggacaatctagccagtgaacatttatgctgcattatccgcagccgggccccccatccgggcgttgaagcaaagcggcaatggcttgccggccggatcagggaaggccacgtctttagaaagttaaatgccaagggagtggtttttattgaatatgcccctctggagacggcctgggttcccatccttggggacaactactactatatatattgcttgtgggtttccggcagctacaaggggaaagggtatggaaaattgctgatggaatattgtctggctgatgccaggaaaaagggcaaatccggcgtttgcatgctcggagctgaaaaacaaaaagcctggcttgccgatcaatccttcgcgaagaagttcggctttgaggcggtggctgctgccagccatggctatgaactgcttgctctttcctttgacggcacaacgccgaggtttgcgccgaatgccaaaaaggggagaattgagagccgggagctgacaatttattatgatatgcaatgcccctttgtgcatcaaaacattgagatcataaaacggtactgtggagagaacgatgttccggtatctctcatcagggtggatacgctgcaaaaagcaaaggaattgccctgcgtcttcaataactggggcgtgttttacaaggggaattttgaaacggtgaatttgttgttggacgtcgccaatctaaagagaatcctcaagaaatgagttgatccggcgctttcataaattattcaggctgtgcggttgtaccttccgggtgcaaggcattcttcctttcctgcctttttcactaacagcaggcagggaaccaatgcttattgcgggtttccatgctccgcctttatgaacgtgagcgcccgttccatcaaggaacaggggggctgccaatggaacagcctgcctccttttacccctgcaaccgctgttcacgccaataaaaaacaggcacgctttgcagcggcctgttttctgaacggggaatccgccccagcctgaaagcccgctgtaaaggcggaaaagctccaggccggatggggaatgagttttttactgaacgatgcccagcggggcggtcgtcttccagtctccgcgggtgaagtccgggaacacctggggcatgccgccctgggccacggagtattcggaaagctcggagacggaggaccagaaggcgccttcgtatacgttctggtccatcggttcgcccttgcggaggcattcgatgatgcggtaaagcatcacgaagtccatgccgccgtggccgcccatcttcagggccagcgggccgactttcttccagagcgggtgatcgtacttttcaaaaatgggggccagtttttcgttgccttcaatccattcgtgatagttgccgttgcccagcttttcaccggccacgcgggtcgggaagccggccagcgtgcccagggtgccctgaatgaggttcaggcgggagtaggggcgcgggctggtttcatcccattccaccaggatggtgcggcccatggtggtcttgatgatggaggtgttcatgtcgccgcaggcgaagtccagcttgttccacttgtggtccgccgggaaattcttcttggcataggcggcgcggcccagggccgggctggagaaggaaacgagcctgccgaagcagtcgtccttgcgggccaggttcatgtactgggcgatggggccgaggccgtgcgtggggtagacgttgccgttgcgcttggcgtagtggtaggttctccaggagccggtgccgcggtccacctgcttcatctggccgcgcagttcgtggatgtaggcggcttccccgtacagcaggtcgccgatgacgccctggcgcaccatgttcaggtacatgagttcttcacgtccgtagttgacgttttccatcatcatgcagtgcttccgggtttcctcggaggtattgacgatttcccagagctccttgatggagacggccatgggcacttccacaaaggcgtgggcgcccattttcatcacgtcgcaggtgacgcggcagtgccattcccagctggggcagacgatgacggcgtccggcttgacttccttcatcatgcgcttgtagtcttccgggccgttcgtgaaaatgggagggcgcttgcccgtcttcttttccaccagcgccgcgttgcgttccgcccagtccttgtacaggtcgcagatgccgacgacttccgcgccttcaatgacggccatctggcccacgtgcatggagccgcgttcacctacgccgacgaaggccacgcgcaccttgtccagcttgggggccctgaagccgcccatgtagatggcgccgggcttgcgcgggggccacgtggtcatgggaccgatgttgttcgggtccggaacgatgatctttttgggagccaggggagctacttcctgggcgttggcgaaggaaccggcagccagggcgccagtagccagacccagggtctgaaggaaacgacggcgtgatgatgaattatccatggatggtaattatatggaaggatttgagtccttagtttgccatacatacccggacttgagaatctttctttcacggatggtgcaaaaaatgcattctcctgcgggagagaggtgctccgcgccggaggcgtcaaaagaggggaaggcaggctccttccgggaggcgggcatgaaaaaggccccattcctgccgcagtgcgggaaggacggggcctgtcaggtgcatcacccggttgtgccgatgttgcatgccgttgcttgggagtgaaggggggtgagcgtatcgctgcaccgcggtccgaaggatcggccctgcatcggaggacatccggagagtgttgcgtggtgtcgccggcgctggctgttgtttcctttcctggcgacggggaagatcattccgtttcctgcggcttctgttcagggaaccttgacggggtccgcatgccgtggaatcgggatcatcttcccggtcgttttgaaggggtccggttactgcgccgtaccggcggcgggaagtgttggcgcggcaagcctggcataagcttcattcagcgccttgcccagcctggggcggaaaacggtggtggtgggcagctgcgtgccttccatgtcacaggaacggaggatttccggaatggacgagcctaatgcatgcttcatgatattcatgcagtcttccaggtccacgccgtacttttcctccatcaggttttctatacggtccgccatctgctccatcctctcaatctgttttttagtcagaatcggctgaatggtcgcgttcgggtcggggacgtagctggtcagcatttcaatggcccgtttcaggttttccggcaaatcagttgcattgccgctgttgaggacctgagccagaacctggtagctgctggtggcgttttcgtcataatcatgaatgcctgaggccagcgccacgcctgcgatgctctgcacgtagcgggctacttccggggaatagttgccttccacaaacgtggagggaacgtcatccgcgtaagcctgcatggcggcctggcaggcgagggaaccgatggtacccacgcacagtgtcttgatgatggacgagacgattttcatgattgaaactcctgttgaagcttcccgactggaacggtccggtgaaccgtttgtagcaagtgagactccgcagcccctgatttcgttcaaaagtttttttgaatgattaaaatcatgcgcccgcacggcttccctgccttccggcggaattccgccttccgtaacttttccgcggccccctgcgggaggcggaacggttttcctgcatggagtttttcctttcccggtgcgtgccgggaactgtctgcaattcagacggtatggtggcgctggaggaatggacgggaaggaggcgccccagcagcttgtgcacgtccctggcttttttgatttcatccggggaacagagggcgatggcttgcccggcggctccggcgcgtgccgtgcggccgatgcggtgcacatagacttccggttcttccggcagatcgtagttgatgacgagctgcacgtctttcacgtcaatgccgcgggcggcgatgtccgtggcgacgagaatgggcgtttccccggaacggaattcccggagcatgcgttcacgcgtgccctggctcttgtcgccgtggatggcggaggccgggtggtcctttccggtcaggaaggaggccaggcggttcgcgccgtgcttggtccgggtgaagatgagcgtgcggcccggctgttcctgctgttccagcagatccagggtaaggggccttttctccgcctgggagccaaccatgcagagggactgttccaccctgtccgccgtggcggccggaggggtgaccatcaccgtttccggttcctgaagcagggactgggccagttgcagaatgttgtccggcatggtggcggagaacatctgggtgtggcgtttcttcgggattttggcgacgatctttttcagggccggagcgaagcccatgtccagcatgtggtccgcttcgtccagaatcagggtttccacaccgcccaggttgacggtctggcgttccagatggtcaatcagcctgccgggcgtggctaccagaatgtccaggccgccggccagcttcttgaactggggggcgtaccccacgccgccgaagatgacggcggtggacaggttcagccctttggcataggcgcagatgttgtcatgaatctgcgcggccagttcccgggtggggctcaggatgagcgccctgacctggcgggcaagcggctttctgggatgttctgaaaattgttgaatgaggggcagggcgaacgcggccgttttgccggttccggtctgcgccagtcccatcaggtccttgttctgcagcagcagggggatgcaggctgcctggatgggggtgggggtcttgtactccagtttctccagctggcggagaatgggagccgacaagccaagctccctgaatgtggttgataccatgtttattgatgtgtctgtgaatgcgcctcggctgcaatgaactgacggaatcacgacaatagcggaacaaaaagaagcccgcaggagcgatactgaaaggatcaatacggagacgcccgtattccgccaaccgcaaatgactatcaaaaatcaacaaccaagcaccattcggcgggaacagggccataaaagcacggcaaaggacagccgtcaagagaaataaaaacgtcccgcacgtcatgaattcttttccgtcagttccggaagaggctggagatggaacccggttggcggccatcaaggaggaacggcctgtaggagcatggagcgcggcaagtccttgcggcaactggataccgggttgagctttagctaattacttctttaaaaaagcttgtgccctcctgcggaatatcaagtcagtttccgtaaaggcctgcggctctcttggcacgcatcacaggctgtccggagggatgtatttcagcgctgcagaaatttgcgcgcgcccacgcagtaaacggccccggaataaacggtcaggatgatggagccccacagggtgaactggtacaggaaattggaagctccggaaccgtaccacaggcagagcgctgcaagctggtccaggaaggagggcaggtattccggcgtgtgcatccaggtcagggccagcagggaggcgatgcagaaagccagctggaaggcggttttccatttgccggacgtgcccgcgggaatgatgacgccgtggtcctgggcgatctggcgcaggcccgtgaccaggaattcccggctgatgatgagaatggtgacccagacggggcagagccccacgcccgtcaggtaaatgaaggcggcggaaacggcaatcttgtccgccagggggtcaatgagcttgccgaaggtggtgacctggttcaggcggcgggccaggtagccgtccagccagtccgtgcaggccgccaggatgaaggtgaccagtgcggccaggtatccccaggaatactggtccgcgatgctgactgctgccgtgaagacgactaccagggcaatccgtgtcagggtaatagcgttaggcaggttcagcatacgcggtttattagggagcagatgacggtccgtagcaagcttttttgcaggattcaggaattaaattcccggaatgcggcacacggaaaaaatcagacggaccatggaagggagaaggggtggacggagggggcgcattgggcgtttttgccttgagctccggcgggatggaacaggcggaagcctgcggcatgatgcagggaacgggtttctgtagcgtcgatgggaaacagcgtagggtagggatggcggcctattccccgaccagcttgttgaaatcttcctcggaaatgacgggcacgcccagcttgacggccttgtcccgcttggagcccccgccgctgcctgccaggaggtaggaggtggatttggaaatggctccggtggccttccccccgtgagcggcaatgagttcttcaaagtagtcccgcggatggctcagcgtaccggtgatgacgaaggttttgccggacagggcccccgccgggatttccagaagattggcccggtaggactgggactggggattgatgcccaggccgcgcagaacgtccatcgtatggttccccgctgcggaggtgaaaaagctctggagggatttggccgccgccacgccgatttcggagccatagctgaacttggccgtgtttttgcgcaggtagcccgtttccagatagggggcggtcaggcggtcgatttcatccgtcagttcctgatggcgctcctgcaccgcctctgcggaaagcgcgccttccttcaccgccttcctgttttcacgggtgttggggttggttttggcggcttgttccatcagctcgtccaggcgtacaatgtcccggaggtagggggagtccgccacatgctccaggtccgggtgcgtgtccgccagcgccttggcgactacttcccccaccaggggaatgccgaaggcgatgagccagcgttccagcggaagctcgcgcgcgttttgcagggcgtccagcgctttctgggcgttcttttccccatagcggcgcggttcctccggcgtgcccaggttcaggttggcgagctgttccagcttcagggagaagaggtccagcgcggaggcagccaggccggagcttctcaaagcttccgccacggaagagccgatgctttccacgtccagcgcggagcgggagcagaagtgggtgatgcccgacacggcctgcgcaggacaggtgaagttggtgcagcgccaggccacttttccctcctccttcatgatggggttgccgcacgcggggcaaaggccccccgtggcttccagaatgctgtagggcctggcatccgccggacgtttggaaaggttcactttcagaacggcggggatgatttcccccgccttttccaccagcacggtatctccgatgcggacgtccttccggtcgatttcatcctggttgtgaagggtggctcgcgccaccgtggagccggacagcagcacgggcttgagttccgccacgggcgtcagcaccccggtgcggcccacctgcacgatgatgttcagcagggcggtttccttctgttccggggggaatttgtacgccgccgcccagcggggcgcgcgcgccgtggcccccagggcctcccgggtggccatggagcagattttaatgacggcgccgtccgtgccgtaggggagcgtgtggcggagcatgtcaatgtcccgcacggcctgacgggtggattccaggctgtccgtataatacaccggatcattgcagggaatgccgcagtggcggagcatgtcccagaaatcctttacattcgtgagttccggcccttcatacgcgccaagcccgtgggccaggaaggccaggggacgggcggccacctgccgggggtccagctgcttgagggttccggcggtggcgttgcgcgggttggcgaaggcggggagcccttcggcgtcccgttcctcgttcagtttggcaaaggcttcattgggcatgaagacctccccgcgcacttccagcacgggaggggcgccagggggaagggtgagggggacgctgcggatggtgcggacgttggccgtcacgtcgtcccccacgtctccgtcccctcgcgtggccgcataagccagctggccgccgcggtacatgatggagagggccaccccgtcaatcttgggttccacggagacgggcaccgtttccgttttcagcgccttgaccagcttgttgtagaattccaccagttcctcgtccggaacaggggcgtcgcgctgctcgaaaatgtcgtcaatggacagcatgggcaccgcgtgcctgatctggttgaagccctggagcggcgccccccccacacggcgcgtgggggaatccggctccgccagttcgggatgggccttttccagcttttccagctccaggaacagggcgtcatattccgcatcggagatctccggttccgcctgttcgtaatacagccggttgtggcggcgcagttcggaacgcaggtagtccacgcggttgcgcacgtcttcctccgtcttgccgggctggacgggggcggcgctttcctgcggttctccggcttgggatcccgcttcatcctttgcctgctgtgacggctgcttgccggccgccagggaaaaaaggtcttcctccataaggaaaatgagtggaaaagagggctatttgctcagtttgatgacggaacagggcgttttggagtgttcgtgcgccttgaacagaaccgttccgttgacgacgggcagggcggtgttgtctcccagcagcaccgctttggagtagcctgcggggagggagacggaggttccttcctcgtcctcgtatccggtggaatccagcggctgcatgcgggcgtattccgcgccttccgtcagttccttcatggtcccttcgctgggcggctgggccggtcccttgtccggcggcggaaccaggaagacgaagatgtccccctgccggttgatggaggcgggctggtccagttccgtgaaggcccgcgtgccgtacacggcctccccgttgatcttgagccactggcccacgccgcgcatggtggcggccactttttccggaacggttccgtccgccatcgggttcacgttcagcaggaggttgcctcccttggtgacgcattccaccagtttttcaatgacggtttccggagacttgatgttggtgtcataccggttgtagccccatttgtcgctcaccgtcatgcaggattcccagtccacgccgggatagccgcgccgggggatgaagcgttccggggtgatgtagtccccgcagcgcaggtccagcgtgccggcctggtccctgttcaggccggaataggcgtacaggcggttgttcatgatgacgccggggttgatggaacgcaccatgtccatcagttccggcgctttccagcccctggctccttccatggctccctgggaataatcccaccacatgatgtcaatgggagcgtaacgggtcatcagctcccggacctgggcgtgcaggtacttctggtaggcggcgtggtcccgcgggatgtttttccttttaagcatttccgcctgtcccgcggggtagcagaggtccgggcagatggtgttgtcataggacgggtggtgccagtcgatgacggagtggtaaaggcctaccttcaagccgcgcttgcggcaggagtccacgtattcgcggataatgtcccggtttacggcgcttttggcgtcgtaatccgtctgggcgctgtcaaacaggccgaagccttcatgatgcttgctggtgagcaccacgtattggcaccctgcgtcccgggcaagccgggcccattcttccgtcagcccttccttgggcttgaacaggggcagggcttccgcagcgtaggaatccgtgtccacttccacgtttttctgaatccattcggaaccgccgggcttgcctttccattccccggccagcccggaatacaggccgtagtggatgaacatgccgaatttggcgtccctccaccattccatgcgacggttgcgttcttccgccgtttccttcacggcggcgtggttggcgtccgcggggaggggaagtccgggggaggctgccgagaattccgaggggaccgtggcgggggcgttttgttccgtcctgccgctgcgcagccgggccgcgaactgttcatccagggccagcgtgggctgtccgttctccgtaacgattttagtggcggactgctgggccagagagggaagtgccagggtgagggccagggcggcaatcgtagcgattttcatggtttttcagggtggtatgaagcggggggagaaagattaagccggtcaaatgacgtccgtatccgcgtaactgcccaggattttcagcatggagcagtgctgttccagctccgggagggtctcccgtaggggggattcctgaatgtggcctacggcgtctatgtaaaagacgtactcccagttgatgaccttggaggggcgggattcaatgcggatcaggttgttgttgtgccgctggaagcagttgatgacttccgccagggtgccgggcttgtgctggatgcggatgagcagggatgtgcggtccctgccgctgggctgcgtttcctggcggccgatgacggcaaaacgggtggtgttgcaggcctggtcctgcgcgtcttcttccagaatgttcaggccgaacagttccgcggccagcgggcagcccagggacgccgcgcccatggaggcgttctccttggcgaggatgctggccttcgtggtggaggaggtttccacgagctccgcgttcgggaagtgccgcagaatccagttccgcgtctggccgagaacctgcggatgggaatacaggatgcggatgtgttcccgcgggatgtccgccatcaggctgttgcggatgttcagattgatctgggcgcagattttgaggggggaggtgacgaagaggtccatcacggcggtcacggagccttccgaggagttttccacgggcaccacgccgtactgggccttcccgcggtccaccatgtcaaacacgtccttgaagctctggcacgggataagttcgcagcttttaccgaactgcttgagggccgcctggtggctccatgtgcccttggggcccaggtaggcaatggtaagccccccttccaggaagaaggagcaggagatgatttcacggtaaatggcctggagggaggcctccggcagcacgcccgcgttcaggcggttcagcttgctgagcagggccgtttcccgttcgggaacgaagatgggggaattcccctcctttttaatgcggccgacttcatgcacccattcggcgcggttcttaagcagctccacaatccgggcgtccacctcgtcaatggccagacgcgccttcgtcagggcgatggtctgttcatccgtgtttccgcttttctgctgccgggggggattggccggggaggcggaatccccgtgttgagtgttctccatgtctctgtgaaagctgtgtgtttaaagccgcgtcagggtagcggttccggaggggcaaatcaagattaaagggggggcttctccatggcggatttttcttgcatgcacgcaagatgcagggtaggtttgcctctctttaatatgatgaaaaaaacattgttgccgactgccgtggcatgtttcctgggcgccgtttcccagatagccggcgccagcgggcaggccgtgaacgtttatgtctcccaggtctccctgtccttccctgatcctgccggcgtggatgacatgtttaacagaaataaggatgccgtggaggtggtgctgggtttcgttgctcccaagggctgtaaattcgttaagggcggtgaggactcacagcttgaagttacggatggccgcggcgtcaggacaaaagccaaattcgacaatttctttacccgcattggtgattccggagcatttgccaaacattccctgaggctgaaacagaaacctgtgtttcccctgaagctggacggagtggtcaacatgaaggtttccgaaggaagcaggacttttccgggccaggagtttgacgcgcggaagggcgccaaattcaaggtggagggcatggaaatcaccgtgaaggatgcaaaggaccacggcaaggcttccggtgaggtggaactggaattcagtgatacgctccatgtggaggaaataacgctgactgacgcggagggcggcaaactggagatacccggcgtgtccaaaagttcgttcagcttcggttccgttccttcccgcacttatacgtaccaggtaaagaacatgcccgctaaaatgaaagctacggtggtggtcagcaagggcgtcaaggccatggatgttcccgtgaaggtgaccgtggatttgaatgctccgcccaaaaagggggcataagggaatatttttatgttggactgttttttacaagggccgggaggcccttgttcccggttggctgtttgttgatgggacgcaggggcggttgttgagcctttgccgggagaatgggggccgccaaaaaatcggcggtttagctcttgtgcgttttctgtccagccgccaagttaggttccggccttcttcctgaagaaccgtggtgcggcgcgccgctgaattctttcttttcccgctcccggcaggtgaaaaacaaatgcaaattcctgttccttcgttcagcttttttcccggccttctgaagccggcattacctgcctgttttcctcctcttcagaatacgctccggcgaataatcttgcttgaccgttatttttttattgataatgatgggtctatgaaaaaatccatcaaactgtgctctgttgctctcatgctcgccggatgcggtgtggccggaatgttttccgccagcgcggatactccggctcccaaggccggggaggctgccgtttccgccgtggggaaggctctggaaaaagccgattttttaaccaaggacaggccgaacccaaaagccaaatattatcttttcctgtattccgccagttggtgcggcccctgctgccgggaaatgccccacgtggtgcggacctaccggaagatccgccagaccgatgatgtggaactggtgctgttttcctgtgacaagacggaggaggccgccaaggcatgggccaaggaggaacggatgaaattccccatcgtcaagccgaagaaagggaacggcattcccggttacaagccgggaggctccattccgcggctgggaattgtggacggcacgggcaagatcatcgtcacagggcatcccgccacgcttctgaaagactggcgcaagtactgcaagccggaggaaggcaaaaaataggggcttcctttgccttttggtgctccctccgccttttccgaaatacggaaaacagggccgcttcagctctgttccccgtcttccctcaccgggcgcggctccggaacggctccgtaaagcccgttgggaaagagctggagccacggcgtatattccggcgggatgggcgcttcaaactccatgcgctttcccatgcgcgggtggtcgaagcccagccgccacgcgtggagcatgagcctgccgggtttcgccttctgccgggcgggtttggcgtaaatggggtccccgatgagcggatggcccagatggagcatgtgcacgcgtatctggtgggttctgcccgtgtggagtgtgcacaggaccagggaggaatccgtggccgggtctgcgcacagcaggtcgtagtccgtaatggcggctttcccggtgcccggattgaccaccgccattttcaggcggttcacgggatggcggccaatgtgggtgaaaaccgtgccggagctttgggcgggaatgccctggacaacggccaggtaccgtttttccgtgctccgggccgcgaactgcgccgttagggactggtgtgcgccgtcgttcttggcaatgaccaggcagcctgacgtatccttgtccaggcggtggacgatgccggggcgttccacgccgccgatgccggagagatccccgcaatggtggagcagggcgttcacgatggtgccgtccgggttgccggcggcgggatgcacgaccatgccgctttccttgttgatgaccaccacgtcttcatcctcatacaggatgtccaggggaatgtcctgcggccgtgcttccgccggttccggctccggaatgcggacggtgatggaatcaccgcgggaaactgggtttttaggcttggcgggagtgccgttgaccaatacgtccccgcttttgatcaggctctggattctggaacgggaaagctccggaaggtgggcggcaaggtattggtccaggcggattttcccgtcggcgtcgtccgtggtcagattcatgatccgtggcgtttggtcaatggctgtaggcggagggcggcaggtcgatgaaggcatagtccagaccgtaaacgtccttgagcagatgccccagggctttcacgccgaacgtctccgtgaagtagtggccgccgaagaccagattgacgcccagttcatgggccatggggatgttccagtgggaaccctccccggtcacgtaggtgcggcagccgagggctgcggcctggacaaggtcgtccccggctcctccggagcagatgaagacgtcgccagccggggcatccggggaatccgcccagaaagtttgaacggacgctccgaggacggtttccagccgctgcgccagctcccggcacgtgccggggaattccccgtgcgtacccagggaaacgccgtggtagtccagtccttcattggaacatggccggattccgcaggccttcgccagcagggcgttatttccgtacacggggtggacgtccagaggaaggtgggcggcgtaaatcgccaggttcccgtccatggcggctttcagcttccggtatgcaatgccggtaatgggctgcatggtctgccagaaaatgccgtgatgaaggaggagcaggtccgcccccgtctccaatgccgcatggatagccttctccgagccgtccacggcggcggctaccctggaaacggctcctccgttttccagttgaaggccgttcagggcgcgggatgcgtccggaatggaatccacggaaaggattccgtccagaaaagcggtaacggtgtgcagctcaatactcatgcgggaggaatggtcagttgtcttccgagaggctggcgccgagcaggcgcacggcgtccatgttcaggataaaatagttgggggatgtattcaccctgccgtaataaaacctgctgtatccggcctctcccgccggggcgatttccagcgtgatgactttttcctccgtctccggttccggggcgaaggtgatgtcgctggggccggcctgggactggacgggggacgcctccttgtaaacctggaggatgagtttcaggcggaaaacgggattcttcagggcctcgtgcgccgtggcgtccgtataggggagccaggtgctcacctccatcttttccagttcgtccagatagcggttggcgcggttcggattgatgttcagggtttcatccttcccatccttggcagcggtccaggaatcgtccagacggtcgaatttcaggatcaggggaccgccggagccgatgcgttccagatgcatttccttgaggtcgaacctgctgaaagagaaaagcatttttttcttccaggccagggcgtccgtcagcaggtccttcatgtaggcgctgtccagcatgacgacggtgggcttgccggcctggcgggcgtaccaggaaccgtccgttcccttggagaaaaacaccgtcacgggggggcgcggttcttcaccgggcttgggcagcagggacatggtgagcgtcatcctgggattgtccagcccgtacacggaaaggtccgtagccttgtcagaggcgaagccggccaccttccccagcttgacggttttcagcagggaaacgagatgctccggattggcctcctggtagcgggagccttccgccgtgtacagccaggtgggcttgatgcccttcttctcatcaccctgaataaagcgggcgatggtggggtaatcctgaaaactcttgcggatggaaagcccggtaatcttgtaatccccgatgtccgtcaactgcttggagcgcagaaggcccaggtccagcggaatgttgcgcacgccgggcacctccttgttggtctccgtcgtctgcgccagttcaaagacggccttgcggtcggaaacggtggccttcaccagttcggacaggcttccgttgtcggaaggggggtaaatgcgaagcgtaacgggctgttcctccgtttgcagggatttgccgtcctccgtggggcgccctgtaaaattcctgatggagacggaggtgatctggtcgtccgtcatgtccggcacgctggtttcctccggattatacacgcgcacggcggtcagcttctggagcgtgcccagcagcacgtccatcatggccgggtccgtatccagggaaagggggtacgtgattttccaggggctgccgggagtcttgcgctccagggcgatgcgctggccccggttgttgatttcaatggaggcgggcatggccggatgcaggagcagggggcggtggtcccggagctggcggatgccggacttgaacaggggcaggatattgccggtgcccaccaggatgcgggtgtcccgcccgtagaaatccgtctgcatgtaggtggtatcgtccgtggtcttgttctccggatcgtccaccagccagggagcgagggaccccagcgtgtagcgggccacggtggaggagcgcttgccgtcgtcgctcatctccttcagggtgatggtgacgggcgtcgtcttcacgccgaactccttcagggaggcggaatcaatcttgtgcaggggcagcgcgtccacgatgctggtggaatatgtgtactggaggatggccgccgccgcgcgcgggtccatgcggtcgtcccacggcttctcgcaccaccagacgccgttgggcttgcggcggaactccgcaacgtcccccacgcaattgatgcgcatccaggaaacctcgttcatctcctcccgggtataggggaaaagccgttctccggaactgaaggcggtgcgcccgatgatgcgggacaggttgccgtcaatggtcaggagcaccgccgcgccgatggcggcgagggtgacgaggataagaaggatgaagcggaatgtgcgcatgtgcttccggtgatgggcgtggtggggttaatggcggcgcgtgttccagataatcagggcaatcagaagcgccagcaggggaaggccgatgtttgtcaggagttccagaatgcccagggcgttgcggtccaggttcagcttcacggtcaggtcatggcgggagccgaggccgcgcagttcttcacggtccgtcatccagccgaccagcgtgcgcatgaagtcccgctgttccggcttgatttgcctgggctggagcaggtccgtattccccagcagcaccaggcgcccggtggtcttgttctggtttacgtccccggcgttcccgcggatgagggccgcgccgatcatcaggggccccgggttgtcttcccgcgcgtcaaactgggccgggaactggttgtacttggtttccccgtaataatcctccgtagtcaccagcagggggtatggcgtgatgcgcttctgctccatggccgcattgtcggaatccaggatgagggagatgctctccccttccagcccggtgctggaattccagaattcgcgcgtgcagttcagggagggcgcgaaaatggcgttaatctcgaaaacggagcggttgcccctgttgcggagcatcacgcggtcattctgtgggcgcaggccctgttcacggaggaaccggtaaagctgtttgggcgtatcctgctggggctccagcatgaccaggatggcggcgttcgggcgcgcccagtaccgctggagcacttccgcctcctgcggggacaggtcgtacttggagccgatgatcatgaaccccgcggcgtcttccggaatctccttcaagccgctcatgcggatgggaacgagctgaaggttgacggaacggcagattttccccagtgtggtgaaaatgctttcctcctggctgttgctcagcgcctcgttgaaattgctcttgtccgccgcaatatacatcttgcggggttctccattggccgccccgtaaatgccggcggtcatcatgtcttcaatctggagggccaccgccttcatgctcttgccgtccgggctgggagcgtacaccacgaaggcgtctccgggcaggatgcgcacgtgggcggcgtccgcctgggtgccttcaaatgtcttgagcgctttttccgtgtcttcccgggcatcgatgatgaccaggttcttcttgaattcaatcccgtaaatgttcgcaatctcccgggccttgttcggctggcggagggggtccacgtactccaccttcaccttcccgttggaataacgttcgtactcctcaagcagggagcgcatgcgggtgtaattctgcgtggtgcgcaggaaggcgaacgtgatcttgacgggcgtcttgcggttctggatttccggagatttcagcatgttgatgctctgctgggaaatctcataacgctggtcttccgtcaggtcccggcggtaatattcgtggcagcccacgtaattcaggcatacgacgatgaggaacagcaggaaaagcttgatccaggtcatccaggggcgtctgaccttgcgggcgggagagaggggggcttccgtggccgcggcggggttgtctggtgcttcgctcatagataaaaatgaaaaggggtgaaagggaaaaggcggggtagatcagtgcttccagcggcggtggtcaatgatgcggatggtgacggcaagcgtcaggaccgtcatggtcaggtaaaagacgacagggcgcgtatcaaccagcccggcggaaaagcggtccagatgttccgagcaggacatgtagtggaaaatccccgctgcggggaattccccccataccacgggaataagccccatgaagaaaatcagcaccagcaggccgatggtgatgatgccggaaatgatctggctgcccgtcagggacgaggcgaaaataccgatggccgtgaaccaggcgccgaccagcagcaggatggcgtacgccccggcccagtccgccaggcggtaggggaggaccatgcccgcatcatacccgtaaatccactgcacgatcaggttggaccagtccgccagaagggggtacagcagcatgggcagccacaggatgatgtaaaaggcgtatgcggagaaatatttgcccaggactacctgccatgtcttgatgggcgtggtcagcagggattccagcgttcccgtcttctcttcctccgccagggaacgcatggtaagcagcgggaaaatgaacaggaaataaaaccagaacatgggggaatgcaggatgaagaacaaaatgccttccttctgcggggccagctggaacgccttcagcgtgccggacagggaaacgctctgcagggccatgacgaaggccaggatgacccatccgtacggggtcatcacgtagcttctgagttcttttctgaaaatggtaagtaccggagacatgtggagaaaaggaaaatgcggggtggtggatagagagggagaagaaacgggcggttaatctttacgggtcatttccacgaacacctcttccagggtgggggtgtggcggtaaatatggcgcagggggcagccctgttccgcaaggaggcgcgcggccttctcacgggtatccgttccggcctccgcgcgtacggtcagcgtatgccagccatcggcgtccgtgccttcatggatgaccttcttcacgtgttccaggctttccagcttctgcgtaatcagctccagatcccctcggaactccagcgtaatcttgccggcggcgcggaggttggccgtcaggttggacggggtatccgctgccttgatggtcccctggtcaatgatgatgaccttgttgcagatcatctccacctcactcagaatatgggtggaaagaataatggtgtggttggccgccagccccttgatcagctcgcgtatctggcgtatctggttagggtccagtccgttggtgggttcgtccagaatcagcagatccggttcacccagcagggcgtccgccaggcccacgcgctggcggtagcctttggaaagggtgcggatcatcttgcggcgcacggggtccaggccgcattgctccacgactttggagacggcgggccatatttgcttggaagaaatgcctttaagcctggcgcggaacttcaggtactccgtcacgcgctggtcgtcgtaaagaggcacgtgctccggcaggtagcccaggtgcttgcgcgcctccagaggatttttaacgatgtcgaatcccgcaatcgtggcggtcccggaagtggggggcaggtagccggtcagcatgcgtaaagtcgtggtcttgcctgcgccgttcggccccaggaaccctacgatttcccccttttcaatctggaaggaggcattctttaccgcttgaaagcggccaaactctttggaaagctggtcggcgtgaatcatggaatcaatgggaacagggtgattctaatccaaaccgctcccgtctcaagcttattctcccctgtgccgcggagacgccgccgccgcttgaaaagcaacacatgctgaaaaggaacagcggctgttccaacattactggggaagggctgccgggaaggaaaatcaatccttcaaatcctcctccagccgcaggacgatatcccgcacgcgcacgtcctcctccatgcgggaggcaaccagcttgttggcatggatcacggtgccgtggtcccggcctccgaaggcctggccgatatccttcagggagcattccgtcaggcggcggctcaggtacatggcaatctgccggggaaaggcgatgctgttggggcggcgcttgccggtcaagtcgctcaccttgagctcgtaaaaatccgccacgcgcttctggatggaatccacggtcaggatgcggctggtttcttcccgcaggatatcgcgcaaaagctgctcgatcttggcgatgtccggcatgtccccggacagggaggtaaaggtggctacgcggagcagggccccttccaggcggcgcacgctcttctggatgcggctggcgaggaactccagaatctcgtcagacacgttcatgccggcccggtcgcgcttgctgcgcaggatttccagccgggcgtcatcatccggaagattcaactccaccgtaaggccggactccaggcgtgccgccaggcgggaatccaggttggaaatatcgcatgcggcggcatcggcgcaaatcacgatcgtcttgtgggagtggaacagctcgtcaaacgtatgcaggaactcttccaccgtcttctccttgccggaaataaactgcacgtcgtccaccagcaggacgtccgccttgcggtacttgcggcgcagcttggcgaagctctgcccgttctgggtgcgggacgcgtcaataaactcattggcgaactgttcgcccgtgacatacaccacattcgcggaggaatcctggtgaagcacctcatggccgatggcctggagcaggtgcgttttccccacgccggacttcccgtacaggaaaaggggattgaacagggcccgttccgactgggcgatggacagccctgcctgataggcaaagcggctgtcttcataaaccacgaacgaatcgaacgtgtacaaatcattcaatgacgcccgtgctcccggggtgcgctgttttttggccggggcggcaggggaatcctgcacctggggcgttttggtgcgggaggaagctttttgcggctggccttcggaagacgtcatggacgcaacctcgtccgcgcagatgaacttcacctggcgctccgtgcccagggccagcatggcggcctgcttcagctccggcgtatagctgttctccacccacagggcggccatgggatcgtcacacaccagcgtcagcgtctttccggaatcctccaggagggaaaacttgggaaaccacaatccataaacctccggagacatgattgtttgcagggctccagtgatcctggaccaggtggctgacaattctgatggtggcgtcattgttgtggaaataaaagatgttgctggttataaatggctgtgaggccttccgtctcgctacgaggccgcccgcggatggaaccggaatgggttcatccgcagccgtgacagctcgtagcgtccatcgggatggagaaggcgaactcgtccgctttcagctcgacaccccggtcgacggaagcgccaaagtactgatttgcgcctgaggaaaaaatatctttttgaagcagcgtgagtcatcgttccgcggctctacgttccacgggggttccacaccaaaaaatattttagtcttgcttcctccgataatttagtcctcctgagtatattctttgaatgacactataataattttattatcagttaattactactttgttattggggtgtgtgacgaaaaggaaacaattacgccgccgtaaatcaagcacttacaggcaccggaccagaaggtcccggagaggttccggaagggggcagccgggatggttgacaagaggcgccgggaaacctaacgtggctgcatcatggaacagatggaacaaaccggggaaacatgccattccctctgcgggggcagatttttggagctcttgaaagaaggaaggtgggaatacgtgcgccgggtcaatgccaacggcgccgtcatgatcgtagccgtgacggaggacggcgaactgctgctggtggaggaataccgggttcccctgcatgcccggaccatcggactgcctgcgggcatctccggagatgaaggggaggaaagcacattgcaatccgcccggcgtgagctggaagaagaaacgggataccgggcggatgcctggacgtacctgttcacggggccttcctcccccggattgaccacggaaatggtatccttctacctggcggaagggctgcaccaaatatcggaaggcggcggggtggctcatgaaaacatcaccgtgcaccgcattcctcttccgctggtgcatggctggctgatggaccagacagggcagggaaaagtggtagacccgaaaatcttcatgggcctctatttcctgtcccgctctgtaaatggcgtggaactggaggagtaatgacgctctgcgccgcaagtgtccggacgcaggaaacggcctgggcggcaggctgtgtgaaacggttggaggaaaagaacgattcatcgtcaatgatttttctggatggagaagcgggctgtcgtgataaaatgctcctgacccataaaaaaatctggacattctttccaatccgggctaaatatctccccgctttccagcaccaaccacttaacggcagggtagctcagtggtagagcagaggactcataagcctttggtcgggtgttcaaatcacctccctgctaccatcttcaaagccccttaaatccaacggtttaaggggttttaatttggtttgaaatgattagtgaggttaataaatctaattttaaaatcaatgagtttttttgaatatatttcaaaaatatttagtatacactcgaataagtcattacagcattccccaaaaaaagtaattaaatcatcttctttatttatgaacttaccaaaagacgatttgtttggcagacaacatattgttgattttttgtataaaatgctcactacttcatcaattgagtgtagtccattgcttatcaacggaagttggggtattgggaaaacagtgttttgcaaaaaacttattcagaaattgggctatactccattatataaatgtatttatattgatgcatatgaagaatccaaaatttcggatcctattctttctatagcacttaatttatctaaatttcttcaaaagaaggataagattgattttcttggatatgctgtaggaattagttctttcctatttcaaacggttatctgtgccacttcctataaattggtgggagaaaaattttgaaatttctgaaaacggaagttctctgatgaaaagatttaataaaagtatgggaaaagatttaaaaaatctttctactttatatgaagataagaataaaatcttgaaagaattaatatctatcgtagataagtcgaatcagaaatttattatatttattgatgagcttgatcgttgttctccagaatattgtttgttattcattgaaaaaattaaatatatatttgaagagtctaatcttcaatttgttatcattgcaaataaaaatcaaataacaaaatttgtagagtgtcggtatggaattaatataaattctgaggaatacatgagcaaatatatcaaagcggagatatgtattcctgaaatatattttgaagatatttcaacgggttttgaaaaggcaaataatgataatgaaaaattaatttacttaatgaatttttcattcttctgttaaatattttattgttcaaaagagacaaaattctgagctcaaagatattagtaatgtagaattatttgtagctgctataatttgtaaaaattcaatgtctttgcgtgaagtagaaagactaattttgtatttgtctatttttcaaaaaatgtcagttgagagtcaaagattagaaaataggtcatcaggatatgctaaacttgtcattttatttattgctctttcttgtatgaacagtgatagaaaatattcttatttgaaaaatcctaatgatctaaaaaaacttaaaaaaatatataattacaatgggaaaatggagattcataaaaatgactatgaatctggtttagatgcttttatagattgtatctatgaaaaagatccgggccaggaattattgaaaaaagcaactaaatggtattttaatgcaccatatttgaagaagatatttcaaaaatatcattttgaaataatactttctcattttagacaagatttagtacgtttccctttcctcagttgctattccgcaatatgtataaatcctaaatctagtaaattacccatggaggaggattttatagcgatagggcattagagatgaggtatagtaacatttttcctagacctattagaaagttagttctttataagatggtaatgtcgccctctgtataggcactctatcaaaaaggcccggtttcaaattaaccgctatagtcagaggccctgcataatgttaacggacaggtatctcgtcagattgatcgacaggggtcaaggtcaagtcttctacgatggagtcatccaaataagggatagaaaacagtagagcatactcataaaagcttctcaggccaattagaaagatggtattacggtttggattggtaaaagagcctcgtcataatgtaaaaattttcttatttccgagaaatggaatcggaaattaaaagattatcgagacttaatcagacaacagaaggctgtcattgattcagcctcaacccgaagactccggatttgcggccgctgagttccagggcgcgcaggcgttccggggggaggcagtcgcgggagaattccgcatagtgcatgcggtcccggaagtagtggacggcgctttgagagagggcgaagataaattccatgcccatttcctccgcttttcttttggcgaattcacatagggcgcggccatagccgcggccttcatggcggtgcttgatgtacaggcagcccagttccgcgctgcggtgtttcgggtagggatagacggcaacgcagcccacgatgctgtcgtccagagtcagcacgtagtagtcatccattctggcggcgatgtcctcatagttccggttcaccagcttggagtccaccacggagcgggcgatcatggagagtagctccggaatgtcctcctccttcaaggggcgtatttcccggtaggagtccgtgtggaccatggtgcctacgccttcttccgagaagagttcctccaccagtacgcctcgcattttgccgtccagcaggtgtacccgggggattcccgtccggcaggcctcagccgcctggtccagtagttcccggtgggttatttctccttccaggcccgccacttccgattccagaatggcggcaatggggcgtccgtcacgggagggaaccttatggtcgttgagcagggcgatgtatttggaggctcccagactgaatgccatacggacggattccgggtcaaaggagccggaacggccggaggccaccacggggatctgatgccttcccaggatttcccggactctttcccggacaagctgaccgcctttcaacggcgcttccaccagggcggagcgcatttcacaaacgcgcgtgtgttcgtacagcgcggaggcgtccgttccttccactataagcactggcctgacgcctatttcctgaagagcgtccaggtccagcaatgcgtccaccagctcttcggaatccaccagggggcgttccacgtgcacggcaaagattttgtccctgaagtacgggacgtactccagcacggaacggacgttggtggatttgttgggagggagcgtggtcaagggcggcccggaagcttgaagacggagggaacggctgtacccgtttcctccgtcctgtaagtgatgcgtagtgttttagaacgtgcgggtatcggcggaatcccggttgtccatggtttccgcgaagtcctgggagtcaagagtgacggcgatttcttcttcctcaccggcggcaggcgtttccgccggcgcctgggcggctccctccttgcggagcacgacgctgaccttgcgcctgggcatgaccagcttgggttccgccacagcgggctggtagccttccccaatggtggtggcgtcggaaatgacggctggagcttcttcctgttccggctgttgtgcggactggtgttcccgtgcacgggagacttgttcccgcagggcggagagcaggtcgctgggcatgccgtcaaaacctatttccggcaggttggcgccgtcttcctgattttcatcggaagaatcaaactggggcaggctggccaggaagtcttcaaacgcatccaggttggtggtgctcttgaagaggttgccgatggcttcacccttgatgctttccatcagggtaacgaacaggtcgtaggcttcagacttgtattccaccaggggatccttctggccctgggcgcggaggcgaacgccttcccgcagagagtccatgttgtacaggtgctcctgccacattttatcaatagcccccaggatgatctggcgttccatgtggtccaggtattccggacgttcgcgggaagccttgtcttcataagtggccttgaccttgtcaatgaggaaggcgatggtgtcatccatctggcgttcttccagcttggcggcgtccgccgtcagtcccagcgggaaggaggagttcatccaggcgagcagttcgtccggatgagtcaggccttccgagtccggatccaggaattcatgggcgcgggtggcgattacttcttccaggatgtcgtaaatcatttcccgcgggttttccgtggaaagcacttcattccggtagccgtaaacgatttcacgctgcttgttcatgacgtcgtcatagtccagcacgtgcttgcgccacatgtagttgcgctgttccacgcgtttttgggcggattccacggatttgttcaggaagctgtgttccagggcttcgccgtcggctacgcccaggcgttccatcatcttcgtcatgcgttccgccgcgccgaagttgcgcatcaggtcgtcttcaaaggagatgaagaactgggaggcgccggggtctccctggcgggagcagcggccgcgcagctggcggtcaatgcggcgggattcatggcgttccgtgcccaggacgaagaggccgccgaggtcggccacgccttcgccaagcttgatgtccgtaccgcggcccgccatgttggtggagacggtgacggctccgcgcttgccggccagcgccacgatttccgcttcgcgctggtggtttttggcgttcagcacttcatgggggattttggcccttttgagcatgcgggagagcgtttcagaggcgtccacgctggccgtgccgatcaggatgggctggcctttgtcatggagttcctgaattttgttgatcaccgcgttgaatttttcacggcgggatttgaagatgaggtcgttctggtccttgcggatgcaggggcggttggtcgggatggggaggacgtccagcttgtaaatgtcatggaattccgcagcttccgtttccgccgtgccggtcatgcccgccagttttttgtacaggcggaagtagttctggatagtgatggtcgcgtaggtctggttttcacgctccacttccacgccttccttggcttccacggcctggtgcagtccgtcgctccagcggcgccccggcatttcgcggcccgtgttctggtcaatgatgatgaccttgccttccttgacgacgtattccacgtctttttcgtaaatgcagtaggctttcagcagctgggaggtggtgtgcaggcgtgctcccgtttcatcaagctgcttggtcagttcattcttgcggcgcagcttgtccttttccgtcatgcgggggtcttcatccatttccgcaaaggcggttcccaggtccggcagcacgaagtcctccgggtgaccgggggagatgacttcacggcctttttccatcaggtcggcgtcgtgggtcttttcatccacggtgaagaacatttcctccttcagcttgtagagttcctttttgcgcgtatcctggtaaagggtcagttcatatttttccacgatgcggcgcagctcgggatcctgcatggcgcgcaggaaggcgcggtggcggggctggcctgtcttcaccttgaacaggcagcggcccacttcttccgtgcggccttcttcctgggctttcagggcctgggacatgagctcgttgcaaagatccgtctgcgctttcaccacgcgttcaatggcggggcgcagggtatcgtactgctgttcccgggtgacgaccgcgggaccggaaatgatgagaggcgtacgggcttcgtcgataaggatggagtccacttcgtccacaatggagaagtagtgcccgcgctgcacctgctcggatttggaggttgccatgccgttgtcgcgcaggtagtcgaagccgaattcggcgttggtgccgtaggtgatgtcgcaggcatattgctcccggcgaagctgggagggcatcatgctctggatgcagccgaccgtcagccccaggaactggaagagcatgcccatccattcggagtcgcggcgcgccaggtagtcgttcacggtcaccacgtgcacgcccatgccggtcagcgcgttcaggtatacgggaagggtggcgacaagcgttttgccttcccccgtggccatttccgcaatgtagccgcggtgcagggcgatgccgcccagcagctgcacgtcaaagtggaccatgtcccacagttgtctttgtccgcagatatcgcgttcttccccgcagagcaaccgggcgccgtgtttgacggcggcaaaggcctccggcaggatctggttcaggtagcgttcgcgcagcttgtcaaactggggggtgatgttgttccacgcggccttcccctcttcaatggaggcgggagtggcttccaccgtggggagggcggcaaattcgtctttcagggattcaaagcgtgcgttcagcttggcggctatttcctccagctcttccctgggagcggcttccacaatgcgcacggggggaagctccatggggaggaagcggtgaagatagccctgccattccttcgttttttcaagcaggaaatcctgacccttgccgttccatgattcttcaatggagacgatttgttccacaatggggcgcagacggcgcacttcacgctggtttttggtaccgacaatcttggttagaatccacttaatcatctttgtcttgttgaaaattgacgaggtagagtcgctttcagcggtctaagaatcgaaaaatactagcggctgccggaagaattgcaagcacggccctccatttgctttgatgatgacgtaataggttggatttgggcggcatcattctgtcttccttccgtttttccttgcctctccattttccctgtaggagtgtataggggaaaggagagaatgagcatgtacggagtattccattccgccgggttggccctttttctgccggctgtttgcatgatggccggctgccaggaaaacggcgccgtaaaacagcaggaagtgaatttgctgtccgaggggattgacgaggatggcaaccttttcatgcattttgaactggattcccattaccacggggatttgtatgcggaagtttccatgaaggggaatgaaatgcgcattgctctgtatactcattccactcccggagcttcccggaaggtgccttatgcggacggttacaggcttgttgtcccatggcccgagggaacgaattccgtggatgttaccctgtgcggaataaatttgggagggtgggagaaacataaatagtaatggagggaggttccattcagagtcgtgattgttatctgaatgttaacggaaattcctgtgcggaggctcttgcttgtggtatgaaggcggaatgaagcctcttttggggatgggatgtgcggtgctggccgtttgcgccgtcggcttttcagcgtaccgcatcctggtggagaggatgcccgatgaaattcggggaacgcgcctggtgatggaacatgacgcttcttacctgccgaaggcgggcatggtgcggctggaaaatgccggattttccagcatggttcacgggttggagaacagggggaagtttttctcactggcggagtgcatcgtggaggcgcggcaaaaggatattctggatgatatgctggatagggtagatccgcagcgttctttgcgtttccatgtgatttgcaacgcttccggtgcgatgaaggaaatatggctgggcgatggagggaacggggagaacgccgtcctcatcaaccgatgcatggccgttctgggagcctattggctcttgcgccgttattgtgatgatgaacagttgtttttcaaatggatgaggctttcgttgaggaacaggaaaacggcgcttctggatgcttccgtggaatacctgtttccctggctcaggccggaccgggaacaatatgttcatggaaggtggatttcggatatcgaatccgtcacctattattgttatcctttggaagaaagcggaaagagttctcttccttccccattcatgtacgcggttacgagccggaaaaggttttcttccgtctccttggagattcgatgctccgcgttgaaaggagcattgatagacgtggagatcaaacaggacagccagatgattcgtgccggaagggccgtgctcatccggattgatgggaacgatcatggccggtcttattcatggaacaggcgccccggaaaaatgttgcccgtgcggctgccttccatggagattccggaaggcggtcctccggccatgatacttcaggttccggaagacttccgttcctgtccggaggaggaaattttgcctgcattaattgaagaatgcccgtgcatgagcatgtaagccggcgcttgagcactaggcatgaaacgggaggcggcatgccattgcattccggctgcgtcatacatggaaagaggcagacgatcagttgggaaagaggataaacgtaaactttttcttggtcggttttgttgtggaaccgtgtggtggcccatggttcatgacaggtacttctcttggaatgattccaaattgatgatataatcaccctatgagtcattgtgaggatgggcgcatccgcatccgcggcgcccgtgagcataatttgcagaatgtggatgtggacattcccctggggcggctgacagtggtgacgggaccttccggatcggggaaaacgagtctggccatgcacacgctgtatgcggaagggcagaggcgttatatggaaaccttttccccgtacgtgcgccagttcatggaccgtatggacaagccggacgtggacgccgtggagaacattcttccggccatcgccctgcatcagcgcaactccgtcaggacgtcccgctccacggtgggaaccatgacagggctgaacgattactggaaattcgttttcgcccgtctggccgtggggatagatccggaaaccggacgggaaatcaagccggaaacacccggctccattgatgaaaagctgcatgaggaatttccttccggaacggaggtgatggtttgcctggaagtggcgcggcccgaatccgtggacctgcccacgctgaaaaggaacctggtggcgcaggggtatttgcgcgcctttgcgcatggagaggccctccggctggaggacgaggaatggaccctggaagacggggctcctttactggtgattcaagaccgcgtgaggctggcggaagaccagcgggagcgcaggctggaagcgctggaaacggccatgcgcctgggtggcggcgtggcccatgtgattccccgcgtggacggcatctggctgcccgccatgaaattccgcggggactggcatccgctgatggagccgcggcccggattgttctccttcaattcccccctgggggcatgcccggagtgccgcggctatggccgcgtgatcaccattgactataaccggtgcatcaagccggagctcagcgtcaatgatggggccatccatatttttgaaggggaaagcaaggtgttttccgaatgcaagaaggacctgatgcgcggctggcgcaaaaatgcccgcaaagttcgtctggatgtaccgtggaaggatttgaaacagtgggaacgggactggctgctgtacggggacggagaggatccggatgaaatgtatgaacaaggcctgtggtacggcattgcgggctttttcaggtacttggaaagccgcacgcataaaatgcatgtgcgggtgtacctgagccgtttccgtacctatcaggaatgcccctcctgccatggcttgcgcctgaggccggaagccctgcaattcaaggtgggcggcagaagcatgccggaactctccgggatgcccatggacgaactcctggcctgggtggatcaatacgtcacgccgcgcgcggatgaagaccccggcttgaagcatgccgtggcggaactcagaagccgcctggaatatctgaatgaagtgggtctcggctacttgacgtccgaccgtcccacgcgctccctttccggcggggagattgaacgcgtgagcttgacgacctgcctgggcgcttccctgacggataccctgtttgtgctggatgaacccaccgtagggctccacccccgcgacacctcccgtttgatttccgccatgaaccggcttaaaaagcgcgggaatacgctggtggtagtggagcatgaggaagcggtgatgcgtgctgcggacagcctggtggacatggggcccggctctggccgggaggggggaaaactggtttattccggagaacctgcccggattggggaagttgcggactctctgacgggggcgttcctttccggcaggcggcgcatcgcggtgcctaaaaagaggcgcaagccgcgtcaatttctgaccgtatccggcgccacgcgccacaacctgcacaagctggacgtgaaagtgcctctgggcgtcttcacctgcctgaccggcgtcagcgggtctggaaaaagcaccctggcgcacgacgtgctgtacctgaacgcgctggtggaaaaaggggccgtatgcgaggatgaacccgcccatgtcaaatccatcaagggctgggaacaactggatgaagtggtgatggtggaccagagtcccatcgtccggaccccgcgctccactcctgccgtttatgccggggtctttgaagaaatacgttccctcttctcggagacggaaacggcccgtgcgcgcggcatgaagcctggtttcttctccttcaacagcggcgacggccgctgtccgcgctgcatgggcatggggagtgaaaaggtggaaatgcaatttctttcagatattttcgtacagtgcccgctgtgccacggctcccggtacggaagtgaagtgctgagcgtgtaccgcgacggcaggaacattgcggatgtgctcggcatgacggtggcggctgcgctggaatacttcagcgcggaaaaaggggccaaggcttcccgcattgcttccaagctgggcgtgcttcagcgcgtagggctggggcacctgaccctggggcagccgctgaacactctctccggcggggaaaaccagcggttgaagctggctaaaatcctgctggaccagattggatccggcgcgaacagccccaagatgctgattctggacgagccgggaacgggacttcactttgccgatattgaaattctgctggccgtgttccgggaactggtggagcaggggcacaccctgctggtcatcgagcacaacccggaattcatcaaatccgcggactacgtgatcgacctggggccggaaggcggcgcaggcggcggccatgtggtagccacgggcacgccggaggaaattgtagcctccgggaagggatatacgggcaaatacctccgggatgtgctggaagggctcccttccgtttacgatccggcggacgccgccatgccggaatccgctgacgtggacataccggaaggcgtgatggccctgcggggagcgcgccaccataacctgaaaaacgtggacctggacgtgccgcgcggagaaatgaccgtgctgaccgggctctccggctccgggaaaagctccctggccttcgacatcttttttgcggaagggcagcggcgtttcatggacgtcatgtccccgtacgcccggcaattcacggaacaactggaaagccctgacattgaccgcttgaccggattgccccccacggtggccattgaacagaacatgtcccgcggcggcaccaaatccactgtgggcaccgtgacggaaatctggcaattcatgcgtctgctatatgccaagctggggcaggcctactgcccgcagtgcggcgtgccggtgggcaaaagatcggagtccgaagtggtggagctggtggtgcggcagctgaaaaaacacggcagtctggccttgctggctcccctcgtcaggggacgcaaggggcattacgcggacctggcccgctgggcggaaggaaagggatatgaggaaatgtgggtggacggcaaattggttccgttgagcggattccagccgctggaccgttattccagccatgacctggacctggtcgtttcacgtccggaggcctcctggaccccggaaaaacttgccggagcggtgcatgccgcgctggaaatgggggaagggttcctgcaagtgcttccgcccggttccagccggccggagttgatggggaccaagcttgcgtgcgcctcctgcgggcagtctttcccggaactggaaccgtacacgttctccttcaactctccacgcgggtggtgccctgtgtgccgcgggcatggcatcgtgggcaagggaaagatgaaggaagaccaggcgcaatccctgctggaagccgaactgaaatatgacaaggaactggcgcggcaggcggacgatgacaaaggggtgaaaacctgccccgcctgccagggagtgcgtttgaatgaatttgcgcgcgccgtgcggcttcagggagtgactcccggtgaaatcgcctccctgcctgccgtagccgccgcggaactggtcaaaggatggaaatttgaacgggaggaagctctcattgcccgtgacgtggtggcggaaatcacgcagcgcctcaacttcctccagcgggtggggctgggctacctctccctggaccgcagcgccacgacgctttccggcggggaaacccagcgcatccgcctggcatcccagctgggttcccacctgcgcggcgtgctttacgtgctggatgaacccaccatcggcctgcatccgcgggacaacgaactgctgctgggtacactggatgaactcaagcgccggggcaacaccctgctggtcgtggaacatgatgaagacaccatgaagcgtgcggaccacattgtggacatggggccgggagccggcatccatggcggcaggattatggctcagggcacctttgaggaactagcagccatgccggactccgtcacgggcgcggccctgcatcataagccgcgccatccctaccgtgggaaaaggcgcaggattccagccagaaaagatgaaaccgcgtggctgcgggtggagggctgccgcctgcacaacctgaaggacgtgaatgcggccattcccaaggggcggctgacggtgctcaccggcgtatccggtgcggggaaaacctccctgatgaccggcaccatccggctggcggcgcgccaagccatcggagacaaactcacgagggaccagaaaaagctgtggaaaacctcctccggctttgacaccatccgcatggtgtacggtgtggatcagagccccatcggcaagacgccacgttctactccggccacctacgtgggctttctggacgatatccggaccctgttcgcgcagacggcggatgcccgcagactgggcttcgaccgcggccgcttttccttcaacacggggcagggtaactgtgaatcctgcaagggcacgggcatgcaaaagctggaaatggactttctgcccccctgctacgtgccgtgcgaaacctgccggggcaagcgctacaacgccgccaccctgaccgtgaggtacaaggggaaaaccattgcggacgtgctccagatggactttgcggaagcggcggaattctttgaaagccagccccgcatctcagacccgctcaaactgctggcggaaaccggcctgggctacctgaccttggggcaggcttccaatacgctctccggcggggaagcccagcggctcaagctggtgacggagctcatcaagggacggcgcgtcagccggaacgccctgatgaagggtaaggaactgcccggcgacctgtacctcattgaggaaccctccatcggcctgcatccgcgggacgtgcggctgctcatcgatgtgctgcaccgcctggcggaccagggaaacacggtcatcgtcatcgaacacaacacggaaatcatggcggaggcggactacatcatcgacatgggccccggccccggtgaagccggaggaaccatcgtggcggaaggacccccggagcagatagccaaaaagaactcccccacggcggaatacatccgccgcgagttggaaccggacagcgtgtaacccgttaaaacaaaaaccttgtctttcaggaccgttccggaattactggaacggtcctttttatatggagaaaaggaccagatggaggctgacggcggacgttggcctggtcacagggcgccgaaatgcttttaaaggaaaaatcagctattctgaaaatggcggaacggaattactgctggaaatgtcttaaaggaagtgcaaggctgtgttccgcataagcctttttattcctgcggcagtggttggcaaataccggagaggcaggcgggaacggatgtaaaggcatgaaagccattctttagaaaatctttgcactgcggtgaaacaacaagcaatgaatatggtggaaaaaatagtatttgaaccgttggtggactcccaccgggaggccgtcatccgtatcttcaaccattacgtgatgaacggaacggctgctttctcggatgcggaactgccggaatccttttatccccatattctggaatgcgtgaaaggttatccggcgtatgccgtggtggactgccagaccggggaagtagtgggcttctgcttcctgagtgcgtataagcctgtacccacattccgggaaacggccaccgtcacttacttcattgctccctcccatcttggccggggcattggccggatgtgcctgggccgtctggaagaggatgccgtgaagcagggcatccgccacatcattgcggaaatatcctctgaaaacgaacaaagcatgtcctttcacgctagccagggctttatccatgccgggcgcctgaaaaacatcggctttaaactgggccgcacctttgacattgtttacatgcagaaggaaatcaagtgatcagcgccggtaatgcagcgtgcaataagatgatgggaatttccgaaaatcctcttcctcacgctattctgatgagtcctctctgaaaagacaggatggcagcgcccttctcgtgggcatcgtaaagatttctctaattttgtaggcgtcttaccgccccagatgaccgcaggctaacttccttccagagtgctgctgctgtgaaagactgcgagaaattcgttaaccagtgcattcacggagcgcaagggaaacagatttgccggaaatagaagccggctcgttcgctgccgtcaaaccgaacactatccgtgttacaatgtactggcatttcctgcgtctgaaaacgacaatcgccaagcttggctgttaaactggtttccccagctagtagggataagtaatttccgtacgatgaccagattttgtaattgggtaacttccttttggaatgaaaatcaaggtgagcttgtgttccgaatggggaatatccatttttaacacatttccggcctgggcagattgaacattggctgtcgcggggggtactatgtccaggcatgtaatatcattgccaggataaaggacaaagatgagcaaagccaataatgctgtaatagagaaactgattttcttattattttttatccattttattatagacaggataattttagattaataagttctttctaaaaatcttttcttggaagaaattgtcctgtatatattcttatcctgttactgtgcggcaggcctatccctcctatttcgatcctgtatgttactctataattttaattattttttacttcagtctccagtaattgctgggctgtttttccatcagtatttttcaaattctggttagctccttgtttaatcagaaaattgtaggcacttatttgtcctgtacgagcagcataatgtaaggcagtttctttgtagggaaaggtcatagagggtagcttcatttcatttgaagcaacattaatatcagcccctaattcgagtaatttcttcatggtatcaatatccccgatagctgccgctaacataagggctgcttcgcttccattccattttttatcatacggattaagatttggttgtggagtcatgtttgacgacaaatcccagtatgattgtaatgaatttctaatcatatcttttcctacaatgtaggcaggagtattgtaatgtagataataaggtggaatatagggatttcttgtttcttcttttttgggggttatggatgtacaagatcctaataagtttaatgctaaaaaaaccgaagggaatataatattagttttcatgtcaaataatttatgatatacttgtagtttttaaagttcatgtggatgatttttatgaaaaaaacaagaatcatgcatagatttttgttatatttaaaataggtaaataatattttatgatttgtaaacagcttttacagaaggatccttctttaatttacatttaacacaacaagcaaatttggataactcttctgctttcagtaaagaatcattgagatcaaaaacatgtatcggaatcatataactcggatgcactttatagatatcaggtatggcttttccctcaaggtattgggaacctactatcatgcatcctctactccataatattgagttgccaatatgccatcgaacgccagaaaacccccccttgggattaagtccgaaattttttccataaacatctttggcatctagttgtattaatcctccctttccagttcggtagggaacattaggagttatttgttcaaaaattggttgaaaattttgaactgcaggtgcctcaggttctgtaaaaaagagcaatctccataggcaaaaacgggagtcatattttgctttttctttaagatagtcttccacttttttattgtaagcttgttgcatctcaactatttcagcaacaaattcttgtcggaatagtttatctatcgacgttcctgaatttgtatatccacccgtataggtcccttcaggaaggggataatcctttatggcatttgaaaaacctttatctgcttttaattggtatcttccttttttaagctctattccctttcctgtaactttggtgcattctttggaaatttcaggatcggttgcatagacttcccagtcgctaagcgtttcccattctaaataccgacgattaacgataatctcaatatcttcaagccccaaagcatcataacctgaggcattgcggatgaaggcatacaaattccacccactctgttcctggatgggatctctgttaatccacctgccgtctgcgggattgaggtggcggtaattgtagtagacaagtcccagttcgtcatccgagaactcgcaggaaaacctgaacttgttctcccgggtcatatctccttcagtggtaagtaagctaccgaagggagcatactcgtaacgagctcttctcgtctgttgtccgtcaaaaatggaagtgacgttcttcaaggcatcgtgcatgaagtagagatgctcttcctgctgtgaaatgttgtctttccagcatgtcatcatcaggacgcgcgtggctgtaggctccgtcggatcccacaaatagctcttcaccagcaagggttcgggatgcgtcaaatccagttgggctacctgcagataatcccggtacaggaaccgggagtggctggatactgccccattgatgaccactttcttctcaaagcgccgtccccggtagtcgtagccgcaggtgatagttgttctgccatcctggctggcgaagacgacggggcggtcgttggcgtcgtaggagacttcccagatgcctgttgaggtcctgatgcgggtctggttgccgtcggcgtcgtaaacggggttaaaatctcctcctcccccggcaatctccgtgtactggttgagccggttggattcgtaggagagggcttcctccagttcccgggctattttgcggttgccgatgttgtcatagcagtacgcaaagcttcctccccgactgatgcggtcttccagcagttcactgcggctgttataggtaaaatctcttactacttcagcagtagtgctgtcccagcaatcccgccgctggacgggctgcatcagcgcgtcgtagtcgtattcgtggccggccgccaattcgccgtccgctcccttcctgtaaccgatagcggttacgaggttgagcttgggatggtaagtattgctgcggaccatgccgttgggataggtgagctggttgaggaagccgctggttggatcgtactgccaagtaaagggagaagcgatgccttccagattcatcccaatcatgccacctttggaatcgtagtcaagatgggagtgctgcacggtgtgtgtgccgagcatcaggcggtatccgttggaacgcccctgggcatcgtattcttcttgaagagaactttccacctgtccaaaggaagtgtcctgaatcatcctgccgtagctgtcataggagagttcccttaatccggaggcgtcctggacgtaggtcatttgtccgaggtggttgtaggtgaacttccatccgggagtagcgtcattgtgggaggcggagacgagttctcctgtaaagggagcatacttatacgttgtgacaagccccctggctttgacaagtgtctcctgacggttgagctcgtcataggttttggaaacacaggaaccgtcggcataagtctttttcaattccagccccgtggcctcgtcatagagccagatggcggtgtctccgtcggttcggccggaaggatcggaagtgatgtcgccttcgtttgctcggaaggtagtcagggccaccatgcggtcggcttcgtcgtaggcgaagcaggccggctgaatggcggtgccatattcggccgtctttctgccgcggatgtcataggaataacaggttgttcctcccaaagcgtcggtgatgcaggcaggatggtcacagcaggacgagtagctggtggtggtgacatggcccgcaggaccagtagtcttaaccgggcgtcctgcaagatccgtttcctccataatggtgttgccgcgaccatcggttttttccagaatcacccctgtagaggtgcaggaacgccgctggatggaacagattccggagtggtcggtctgattggtcccaaacccgtctacgacaagagactcggctataatatccgaagtgggaatgcggctgaaccgggtgcgtttggtaggagcggtatactccgtccactggatgctctgctgtccgtagacgtccgtggtgatggatttgttttccagtacagcgctgagtctggaaaccatgttttccgtggtctgggtgagggggaatccgtcggcgttgcaggtggtagaagtctgcacctggtagacgccgtcttcccggagtcggtaacaggaggaactttccgatatcctgtttctggtggtgtcattgggatgaagttcatccagaagaacggtctgcttcacggcttgccccagttcgttgtaatccgtgagggtgggagcaagatcctccgtttgagagcggaccgattgtcctttgtcgttgtagaagttcctggtgacgataaagccgcccctggtattgggctgttcctgccggacggtttgaccaaagccattttttagaatccgcgacagcacaactcccttggacaaggtcgtggtcaggatgccttcttcgctcaactccagcctggtctccacttctctttgccccgttcctccctggaacaggacaataccatcgtagtactttttggtaatcagcgtagcgcctgccggagtggtgacggtagtcgtgagtccatcctcactgtattcggttcgcgtgacgcgtcccagcatgtcggtggaggaaacggcccgtcccagagtatcatactccgtcctttccaccgtggtcatgggccctacgtcgcggcgcgtggccatcgtccttcccgctgcatcccttgtgtaggaggtaatcgtttctggcgtggtttctgtcgccgagcggatggtttcctccagctgcttggccgagttgtaaccgtagctggtcacaataccgtcttcgtcggtttccctcaacgggccacagcacatccattccgtcgtgctggtgcgcccgttgcccttcgtcgtcttgatgagcctttgctcgtcgtcgtattcgtactcctccgaggcaatcagcgaccagccttctccggtgtgaacgtactgttcgcttctggaagtcgtgccgttttcagcgatgtactctacgttcctggtgctttgtccgggaacaatgcttccgttggcctgcacagttttagtcaccttgtggagggctccgtattccgcggcggcttcgtaattataaacggtttgcaccccgtcaatactctggctcatcttttgcctgccccgggcgtagggatactccgccgcttcaccgtaggtttcagagatactgatatgtgtgttttccgaacccagagcggtttccgtcacggtcgtgcggttcacctgcgggctgtcttcataggtataggtgcgcttgccaagttccgtttcttttccatcctcagctatgaccacctcggtttccgtggcgggtctgaagtcgttgaagcgcaggtccgcgtaagtcgtgcgggtgccccgttccccgcctccggcccagggagaggcttgcagcaccacccggcccctctcgtcgtactcgtagcgcgtatagccgccattgggcttgatttccagggacacccggaactggtcgttgtaggtatagagggtggtccgggccagaggcgtgttgtatccctgggtgctgctgatggtcagccagcctccgtcggtatacttcttcactgtccgggtacaggaggcgggcgcttcctcgttgatgccctggatggtttcaatgcgctcccacttggagtcggtcaatgcattgcgttcaatggtgcgaacgatgcgctcctctccgtcgcccttgacgatggtcaccttgttgccttcctcgcggcgttcgatgaaatgcggttcctggccgggccgccggttggtgatatgcgtcaccgtcgctccgttttcaagagaggtctcgtaggttgccgttttgcagggctctccggcaatggtgaacccgccttccccgtccgggacggccttgccgggagcataccactccagggtgagcctgtcgccttcgggaatgcttctcatcagcccctgggcgcgggaataaacactggcaagggtgccgttttgatggtaagtgacctggaccttgctgaagtactcctcggcagagatcacatggcccgaaaagctggtgaccgacacgacctctccggtggaggaagagaagcgcaggaccatgccgccgggaagaaccatgtccatgaaagcgggagtaccctggaggttgggagtaagatcttcgttgagaagcctcacacggtagtcgctcttcctggaagagccgatgggagaagcgtcgctgcttccctcttgggccttgaaatagagatggcttccggaggggcgcttgacggtgacgcggcgctcgtcagccgagaaggaagcgctccaggccatgggatggttgtagcgcatggaaaaggtgctggaagccggggcgtgaggggcggcggcagagcgtgccgtcgtgatgaacctggcgggaaccggaggcgtgggtcctcccggggagggagggttgatgcaggcgttgccctggcaatcctgctctccctcgggatcccccggagtgggctgtgtctggacacagtgttcgtccccttcttcattgcactcacattcacaggggcacggttcctcttcctggtccggctcgctggaggaagaggaaagggaacttgaactgctgctggaagatgagcttgagctcgaagaacttgatgagttagacgaagaagagctggagctgctcgaggaactggacgaggaggaagagctcgaactgctgctggaagacggagcgctgctggaagaatccggctcctggggcggcaaggaactgctgtggaaactggaagacgaactgctgctggaagaagatgacgaggaagaactcgaactgctggaagacgacgaattggaagaagaaggcggcgcgctgctggaggaatccggaggctcgggagccgaagaactcggctggaaactggatgaagacgaagagctgctggaagaagaactgcttgacgaggaggagctggaactgctgctggacttggggtcaaactcaaacgaatctcctccccccgccgaactgctcgacgaatccccttcttccatctcctggtacaggttgaccagcgtcagcacggtttctccttccttgtcggccggcggggtctctgccagcaggtaataatccaggtcgggctcaccttccttgtcgcacattaaggcaatgcagaactcctcttgcgactccaggtcgggctggtgttgatggacgatatggcaccagtagtatccctggtcaaactggatctggcggcgcagaggggtggaagagcccggctccgtggagagttccagatccttggcgggaatggaaagggagatggaagagtgggcgtgaaggtggagaaaacaggtggcggaagccatgaccttgaggtatccgaaccattcgcggcgggtgggggaggaagcgatccgtttgggaacgagaacgggagcggagagtccgttgaccaggaagttgccctggggctgcccgttggggtacatgggaatgaaggggtagacggtgtccatggccgtgatgttgaaagtgttgttcatggtaatgaaggtaaaattattaaatggttgcggttaccatgagaacaaaaaccagcaaagtaaacacgccggaaatgttatgatatttggtgagtttttgagacggatggcaacatgggaaaagagaaggcattcatcgtcggtggcacgtatttctttgccatattttcaaaatttacccattgccagggtaaaaggcagcgtgctagcgtccatcaatgaattcgttcaacatctaactccattatttcatgagcaccacattgaaaaagatctatgtcaacgggttccccagtctctacgggggcgcgggaaccgaactccaccaccagattctggtctggctccacatgggtattgacgtccatatcatccccaccaacggcggatttgaaaatgaagccctttatttggaaatgatccgtctgggcgtccatatccacgctcccaatgattggacagtcctgcaggaaggggatgccatcatcggattctgcaacggagaattcctggaaaacatgccagccattcgccagcgcaccaaacgcaccatctttgtcaactgcatgacttggcttttcaacaaggaaaaggaactcatgaagcaggggctcattgccatgttcctttaccagaacgaggaagtcaggcagaagaacatgcccctgctcaagcgctgcaacgacgacccctccatcgctttcatgacgttcaagccttacttccacaacgaatccttccctttcattgaggagaggacgcaggaatacttcggctgcgggcgcatctcgcgccaggacgcggacaaatttgcggccaatacgctccatatttatgaatatttcgtggcgcctgtcttcaagcgtggcctttttctggggtttgaccagaggagccgggagaaaatcggagagccttacagttggatacgcacggcccgcgaccagagggaggtgagccagcaggacttttacaagcactgccaaatcgtgctccagccgatggacacgacggagaactggccgcgtgtcggttttgaatccatggccagcggaagcgtgcttgtggtggacaaccgtggaggctggagacagatggtggaacacggaaaaaccggctggctgtgcgaccatgaaagggattttatctactacgccagcaagatggcctacgagcccaacctgaggtccgacatggcccacgcggcgcgggagcgtggactggagcttggagggctggaagcgtctgtagccagctgggaggaagtctttgacgcggtggaaaaactgccggcttagaaatgggaggaaaaaccatgaaaaagaaaacaaacattgtcgtaggcatttgttcatgccatggaacgggagataaacggaaggcggtaaggtctacctggctggcccatcccgcgcagaacgttgaatgcatgttctttgtaggaggaaaccgggttccggagggggaagaagaagatacggtggggcttgatgcgcccgatggctacaacgagctccccgcaaaagtgaaatccttctttcgttatgcgctggagaattacgaatttgaatggctctttaaatgtgatgacgatacgtatttggaattgagccggttgacctccttgatagatgaagattatgatctgattggggatgcgatggttgcgcttcgcaattcaccgagcggaggggcgggctacctgctgaagcgcagcatggtggaaaagctggtgaatgcgccgggttttgcggaatgcggggcagaggatgtgatcgtaggtgaactggcaggcaggctcgggggccgcttgaaatccacgaaacggctttacatgtccaatgtttattacccggaacgggataatgacatggtaacggcccactggtgttctcccgacatcatgcaggccctgtattcgtttaattacaaaattccctccgctgtgtgcgatgttgttcatcttcattggaaaggggaaatgctgttttattccaacggggcgttcaggaggcgggatacttcctgctatggctggtggagcattggctccaagggtgaactgaagctgaaatggcagatgtggcctatggagcagctccttttggagggagaacggtttatcgggtctgaaacggagatattccagcggtcggacatgccgtccctggcccggttatgggctgagcgccgcctttcttccggcaacgtggaaatcatggatcaatctcctctgctgtatatccatttggggtgcggcacccggaggttgaatggctggttgaatctggacgctcccaattatgatattaccaggccgctcccttggaaggacgattccgtagacgctttttatctggagcatgtcattggaacagtaacgcctgcagaggcctgccgatttttcacggaagccttccgtgctctaaaacccggaggaatcttacgattaagtttccgggacgtgcgcctgatgcgcggggtgatgacgcccgcgttcaggcaatacatgaagagacaggggaaaggaaatcaaactccggagaatgatttgtgtgcatttatggaagtctacaagcaacaatccctgtggtctgccgatttcctgagttatgttttggaagagctggggttccaggtttcccagcatgctccgggtaattcccgccatttgcaccttcagtgtcttgaaaggcgatccgacagggatgaacatccttttgacctgctgggcacggtttgcctggatgcccggaaaccgcagaagactgttaccggtaaatttttatccttgcgtcccgcttctgttacggcatctcccggttacgtcacgacgcagtttatgcccggctcgcgtacgtgcaatcatctgttccagatagctgctgcctatgcgcatgctctccggctgggtgtgggatgccgtattccctggagatacagttccgagacctgggagctgatgacttatctgggtgaggcctgttcgctgtgcccggacggtggatataacgatcccgtgacatacagggagcccggattttcctatcatcccattcctgaaacggttcgctacggcgccctgagagggtatttccagagtgagcggtatttcaaggatgttgcggaagaaatccgttccctgtttgctcctcttattgctcccgtccaggagggcgtggccggcgttcatataaggatgggggactatcttgaccgtacagacatgtaccatacgccggatgttccctttcttaatgaagctttacggaggctttccggcaacatcagtaagctggtcgtcttttccgattctccggaattggcccggaaattgatggagggcgttccggaagcaacgcgttttgaaatagtcatggatgagcatgggacgctggacgccctccgggaattgacgtccatgcaggaactcgtcctttcctgttcctccttttcttggtggggagcatggcttggagaccagcagagggtttttattcaaaaacagtggtttaccggaaagattgaggacgagcaggacattttctgcccgcaatggattaaactttaacaggtacattttatgaaatgtgttttgattgtgtctcctggggaaaagtcggaaggagcttcggaattgcaccggatgggttatgagctggagctctatccctctaccgcggatctttcccccctcagggatgcgcgggaagaggaaagtgcatcctacctgggacggtccccggcgtctgcggaacgttcgcacgtccgttctctgagggcatctttcatacgtctgctggaggacagaaattatgctgggagtgacctgattattttcggagaaagcgatgccgtgccgatggtggcttcttcccgcttggaaacggctctcaggaaggaaatgaaggagcatccggagacggatattttccggctgttccatcatgcagtatggtctccgcaaggggctctaggggaatctgatgaaatcttgtttgaagatttcaaaacgggaaagacggatgccaatacctcctacgtatggggaacgcatgctctcgtcatccctgctgcccgacgccccagggtggcccgggtttttgccgattaccggttgccgactgatattgccctggaggctgccaacagccatggagacctcaagatccgtgtggcccgccacaatctgttttaccagcacgaacggactaagcagaggcccgattgcaaaattgctgtttgtctctcatcctataagcgtctgacggatttgcagaggcagatttggtgcatgatggatcagagctatccgaatcttcatgtgttcgcagctgtcaaggggataccggaaggcacgtaccgcagaacagtgctccctctctttgaacattttattcacgaaggccgtttgacgatgcggcttttccccaacaagaaccagctatccaatttcttggacacgataagggatttgaacgtttccgattacgatcttttcgccaaaattgacgacgatgatttgtacggaagggattatttcaagtcagtcaataaattccatctgcatcttccgccggaattcagcagcttttattgtggaccgggcgaatatctaagcgtgcgtggagggtatcccttctccggaaacggatttttcggctgctttggccccaccttggtattgagtcgggatgtgctggaaaaattaataatttgtgagaccaatcctcacatgatatcccagatctcgcccaggctccgtcatgccgggtatggatttacggaagacaacttcatgcacatgatgatgctggataccggaagcagcaaccgcacccggtatgtacaggaaatggccctgccaatgcatctggcgattcagaccggcaatgcttccgtgatgcgcggagggctggttccgggagatttccggggcagaaactgcaacatttctacgaaccaggttaatgaggagcgtctcatggaagtgcatcatccgcaatggcatgatattgttcgtgtctttgggaacagggcgcgccgttttgaacgggacgacgaagcggacgtcctctccgtcactgatgagaaaataactctcaagtgggatttctggggcgtggaggcgtttaaaaagatggaggatggaaccttctatttgtcgagcggcggcagacaggaggaacctttttctccccggaaaaaagtggctgtcctgtttatagccacggggcgttatatgacgttctgggatgagttttatgcggcctccaaacaatatttcctgacagggcatgatgtgcattattttctgttcacggatcatccggaagtggaaaccggcgatgacgtgactcttgtccgcaagccgttttatccgtggcccatggaaaccttgagaaggtttgagacttttttaaccgttcgggaggaattgcagcaatatgactacatttatttcatgaatggaactttgcttcccgtagggcctgtcggtcaggaaattttcccgatggaccggcagggtctcatggtgacgcttcatccggggtactaccaacgcccccgttccacttacccctacgaaaaaaatggaatgtcccgggcgcgggtgctccattccgaaggagaatattatgtcgccggaggctttaacgggggaagggctgaagactatctccgcatgtgccgggagttggcggatgccgtcaggcgggatcttgaggacggtgtcattgccgtttggcacgatgaaagccacctcaataaatatgtgattggccggcatccccttgttttatctcctgaatatttattccctgaaacattggactttaatcaaaaaaatctcatggcgatcaaaccgaaagtaaaaatgatcgtaaaggataaatctcttcaaaaacacggaggtcacgcatggttgaggcaacagatataaattcccggcaggccaaacgtgccgcttttgcggacttctggccggggtttgatccacatgataatattctgtccgcggttttgacggaaagactgggcatgaccgttgtggatgaccaggatcaggcggattttttaatctactccgtttttggagaaaaacatcagaactttaaggggattcgagttttttatacgggggaatccgtcaaaccgcgttgggatgagtgcgattatgccatttcattcatgaggggagatattccttatcccgaatgtcatttgaggatgccctgctggatgaacaatggccctgtcagaagaacgggaaaaatagaacaatactccaaagacagaaagtcccttctgtccaggcatacccggttttgcagctttgtgtattccaatgggaatgctccggaaagaattcatttcctgcgcctgctttcccggtacaagcatgtagattgcggcgggatggtcatgaacaacatgggctcctgcgttcgggataaaatagctttctgctcctcctgcaaattcacgattgcctttgaaaactatccggctgctggttacgtgactgaaaaactgtttgattctcttgctgctctttcccttcccatttattggggcgcccccgatgcagggatggaggccaatccatcccggttcgtcaatgccgcggacttttccaccccggaggccctggctgaatatgtgattcgtcttgatcaggatgaagacctttacctcagttatatggacggtcccgtttttgtaccgggccagccggacatcggagaatatatgaaccgtctggcagaattcttttccatgatttcatgcagcgggaatatatgccggactggcaggccgcgtacggaggcttgccgtctgcatcacggctatcccgtcatgtcccggcatgatgacggaaaacaatggacgggaaaggcggaacttctgctgccccaatcgctggcggcaactccgtttcccgtgttctgtccggaagggaaggacacggcttcccaattcatccgcaagctggccattattccggctaaaaaacattcggagcgctgtccggataaaaacaggcgcttgttgaatggaaggcccctgttcctgtattccgtttcctatgccctccaggaaggatttgttccggttgtcagtacggacagtgaagaagttctggaacgctgccgtcgggaaggcatccggtgcttccgggagacggtggacgaccgccgaatggaaaattgcgtacgccaggtattgacccgtttctcctgtgacatattcgccgtacttcagccgacttctcccttccgtcgtcggggcctgttgcgccaaatggcggaagacatggaaaaagggaaaattcaatccgcctacacggcccgcaaaaccaaaatgattggtcacatggagggacatttccatctggcgcatcgggaacaggacgccaagaaatttttctatttttttgacggaaatattaatgttgttacccggaaaaaatttctggaatcgggtacgatgtttgatgacggctcctgcccttacccgaatgattttccctgttgtctgcaaattgatacggaagaagagtggaaagccttgtcacgtttaggtgaatttaaagactggcaatgttttctggcttcagaagggcataaaaaacgcatttgcatcgtctcaaataaacgtgatttgaaacgcaactattcctcttttgtcgactcttgcgacaaagtaatgagaatcagcaaaatggataacttgaattccggtctggcgggaaaaaggacggatattgttcttgtttcctgcttcgccggatacctggctttttcccctgaggaaaggcatatggaaattttacgcggagtcccggaaatttacttcaacaatgaagaattgggctattccaatgaatttgcttgtagggaagggctggaaaactggaaattcatgccgggggaagttcaccgcagcacgggcaattttaccacgttgagcaaggcgctttgtctggcggactatttattccctgaagcccagctttactatttgggagatacggatatgaacctgagggccgcgggttcttcaaagcatcatgcgccaacggaaaatgcctacatgcagtccctcattgacagcggaagagtcattcccattctggaagatgccgccggtgaatttcattactccgccccggcgccgccggtttcttcccaggggaatgttcccgcaccgggcttgcttcctgtggacaccattctcatcagccatcctcagtggacagaccaatttcagatgaatgaaaaacggggacgccggcttcaccgcaatgaccacgcaaccatacttcaacatgatgaaaacaaactcgttcttaaatgggataactgggggactgaagaatttctgaggatggaagagggtaaatatcagtaccttgactatcattattcttctaccatcaatgaagtgaacaaatacgcgcgggaattgctcatcaacccgtatgacggctataactccgtgttccggcattccagccgtccctttatcggcatgaggtatcatcaatgggaggggttgctgctgctggaacgcatgtatcgtgatgttgaaaaaggaatacgaaagatgccccggcttcaatccgtcctgctgatggggatttgcaaggatgcgtttgcagcccttattctggcgcagcgattgaaaaaggatttcccgcatcttcatattggcgtgtggggatgcccatggccggtggatttaagtggacagtctcctgtataccggggaataagagtttccccatctcatgaacagataaggaaaaaaagaccgtttaaaaatcttttggagcgttatggagatcctctcaaactgcttcagcagccggaatcctccggactttgtttgtttgccttttacagtaccagtcaacattggactcttgatgaagaagcgacgaacagattggctccttaccttctgaaaacatatgcccatcaggctggcagcaaggaacatcatactgttgttcacggaaaaatcgtacatctggtaaaggaaaagccggcattggttcaatcctggattgaggaaatgttccggatgatggaaacggaaagcgggaaccatggggaggtgagaaatctgcgtatatccgcctaggcgtttcgcaaaatccctcaataatgaaaaatccctaatcaaaaaatggaatgccaatcacaaaaaacaaaattggccgaaaacatgaaacggataggttttctccgtgttctcaatgaagaaaacgcagttatcccatgtttgttgagcgtagctcccgttctggaccacgttgtggtgctctgggcggatatggatgaccgcagcattgacctggtcaaggaatgggaacatcacctttgccacgcttgtcaatgccgggtcagctttcttcattatccgcatcatgtcgttcctcctcattccgtggatgacttgaggagccttccccgggaaaacagaattgacacctacttgaatttcggcatggaattcattcgccgtctttatgaagggcagctgttttgcgtttctaaaatagacgctgaccaaatttattttacccgggaactggaagcggcctttcaaatggtatccggtccggaggattgcgtctccatccgggggcacaataccctggttcatcagcaaagattgatgatttatggtcctcggcctgtaaatggcggtggcgactccctcatctgcggcatgaacaacttgccccgctttggaattgcggcgccttacgaagtggatataaccgctcatccgcaggtgaccccttatcctgatgcctgctggatgcacttcatgaaaacggctaaatacaaaaatgtcatccgggaatttcatgacgatgaagtcatccctctttctcaaaagccggctctgcaggagtgctttctctctcgtattctgccgttattgcaggaggcaaaaagcccgtatgcgcatctccgcctggactagtttcgtttgatgccggttggacaggaaatcgcatgttttctcggaaaaactcttatctcacgtcactcggatggactctcccgtttgcatagcttttaccgactttgaatccgggttcaaaccgcaaaaccacattctgggcctgatcttgaaagaacgtttgggcgctgtttttgtggatgacctggcccgtgccgacttgctgatttattcaatctttggaaatgccgcacgttcctttaaaggtcctcgtctgttttatacggaagaacctgttttgccgcgctggaaggaaggatgctattccctgacaagcctgagagatggaacgctttccggggaccgtcattttcgttttcctgcgtggttaaacgccgactatatccgcaggacgggtcacattgaacaatactcctccgttccaggggatattgtcaaccgtcatgaaaaattctgtaatttcgtctattccgggggagaattccgggaagccgtccgttttttggaaactctttcccaacacaaatacgtagacagttccggccagcttctgaacaacacgggcatgatcgttaaagacaaagtcgaattctgctcccggtacaaattcaccatagcgtttgaaaactatgcttcccccggttacgtaacgcaaaaactgacggatgcttttgctgccggaagcctgcccgtctactggggagcaccggatgcctgccgcgaattcaaccccgggcggttcatcaatgctcgtgattttcgcaatcatgcggaactggtccggtatgtggagcacctggacaggaatgttgacgaatacctctcctacttcaaggcccccttgtttgacgagggacagatcggcgtggatggcctgctggatgaagctgccttgtttttcaagaaaattttcagggagggaaatgccgggcggcagcctgcctccatggagggaaaggacgaaccgttgcttcacgggggagtttttatgccgcggtatgacgatgggaaaccatggacggtttcggaaacagtttctccttctcaaaaacggccacttggacggccattcaatatggcggcatgcattgcatcatacaagcgggtggaagacctccttcgccagattctctgcatgatgaaccagagctatccacatctgcatgtatttgcagcagttaagggagtttcggctgaaacggcccgcaggattctgcttccccatgtgcagccgttcatcgatgccggaagagtgacgctgcgcctctgccctaacagaaaccagcttaccaactttatggataccgtccgtggcctggatatttcatcctatgacctttttgccaagattgacgatgatgacttctatgacccggactacttccggcatgttgccgattttcatgccctgttgcccgatggttattcaagctgccaccgtggggagggcctgtggctgaaacggcatgaaggatacccttatctggaaaaatccttcctgctggccctggggccggctcaagtcatgtcgcggcgggtcatggaggatctgctggcttgggaaaccgaccgcgcggctatgaaggaagccatgtaccgttgtttaaggcaaacgggattctatcaatttggctttgcggaagaccagctattccagaccgtcatgctggaacacgggtgtgctgacatagctccctatctgaaaaagcggggaattcacagccatctgattatgcaaaaaagcaatgcttccatcatgcggggaggtactgtttccgaggaattccggaaaatgcagaacggtgcttctacagatgccgggaatgatgaacacctcgtggacatcatccattctgactggaaaggatgcatgaaaatcagcaatggacgggctattcgcctggacggccctcgggatgaagccgacgtgctgtctctgaccggagtggaaatcacattgaaatgggataaatggggcgtggaaacctttacgaaaatggaagaaggcgcctaccgtttacggaagaaggaagaagccgccttccttcaatctcctccccatgcctcctcccttattcatttgcgccagcaggattggacggatggcttgtgcatcacgggaaacaggggaaagcgtttaaattgcaacgatggaggcgaaatccttgaatactcggacaaaaaactcgtcataggctgggattactggggaaaggaaacctttcttcgcagagaagacggtaattactggttctcttcctattcattcatggcgccggactcttctattgcggatgaatatgtcattgctctctgcggcgccccggaaaaaccgtggctgcattcaacggggcgtcccgtcattcgtatccgttattcttcctggaacctggaagaccatttggacaacatgaaacgggatatccttgaatttctcgccgccaccccgcatgcgaagcgcattctcctggcagggagggcggaagaagccgttgcctgccttcttctcgcttcatgcattaaaaaacgctatccttccgtccggaccggaattctcggaatgccgtggaacgtcggccgggaaagccggcatacagaggaaaactgtcctcaagaaaaacgtctccgggtcaatccgtcgttgctgcttaaggaaaaccgggcgcaaggaatcgatacttgtgcgtacgctttccatgtaagcaacagtaacccggaacaagtggaaaacaatctccggaatctccttgattctctccagatcatttacaatttctcgcccccctgcggttggggggaaaaagatgaatgcaagggtgcaaaaaacttcattcagcaatatccggaaatattcaagcgcatggcggattgctgttttgacgacttgaaaggaaaatccgccccaccggaatatatcgatctgaacgcatggatcatggaagatagataaaaattagagttatttacttgttactaagtatataggtcccttttgaaaagatgtacaggagattcatgccacagcacagaacactacagcctggaaacgaaaaaccttgagaaaccgagggttttactcatcttaaaatctgaaaactggcggagagagtgggattcgaacccacggtgggttgccccacggcggttttcaagaccgctgcattaaaccgctctgccatctctccatgcaacaagcgcgggcataagctaccgtgaggagggcggttctgtaaagtcctattcacgtctgcccgcaggtttgcggagatggcatgagtgcctgtgcttcatgaaattttgtgctgccggtggagatgttttatccctgaccagcaggggaatgaggagaccggtagtgcattttacgccgggaatcaaggggaatttgggttggatattactctcaggggctgtataatgccgggcatgaaaggctcccgcattcttgtcctgaccgggcccggcaagggaaagacgacttccgccttcggcatggccctgcgcgcgttggggcatggcgggaaagtggccgtaattcagtttatcaagcacgacggttcctatggggaggtggtggctctccggcagtttccgaatgcggaagtggtgtgttccggggccggatttacgggccgcgccagggatgaagagtcccgtgaacgccacgcttccgccgctcgggacgggtggagggtggcccgggagaagctggcggatgagtccgtgggaaccgtgattctggacgagattttttaccccctgaattacggcttcatttccgttgcggaagtcgtggatgctttgaaaaaaattacccccggaaaggtcgttgtcctgacaggccgggatgctccggaggaaatgatcgccgtggccgataccgtgagccggattgaatgcgtcaggcatgcctttcagcagggaatcaaggctcagaggaatgttgagttttaagatattctcttctgaaaactctcaggtaaacctgttctctgccgttggccctccctctcttcattcctgcgtcgccctgaattccggtggaagctgccccatgagtttcagggcgcattcccggggcgtcgcttccgtggtgtctatggagaagtcatgcgggaaattctggtgaatgcttccgtattggcgctccgcatgggccgggtccggagtccggtcggtacggttccgctcgcgttccagcaggatatcttcccggcagtccactttgatgagggcgcggggaatgccgctcaggcggttcaggaggtcttgaacccaggcgcgggattcgccgatgacgtggtccacgatgaccagggcgcctttccgcgcggcctccgcaatggcggcgtggaaggactcgatgaaggggagcccggtttcccggacggcgtccagggcgttttcatgccttccccggctcatggacaggtagtcgtccatggaaaaaatcatggagtcctcctccatgaggcggtgcagggtccgggccagcgtgcttttccccgcgctggaggccccgttgagcaggatgacacgtccctgccgcggctggggctcctgcgggtggtccgggggttccgttccccagtacaggtggatgtagccggctttcacgttcccatccgccactccttcccggctcttgtttccattcttgtccgtcactgtgtaaaggggcgggtagggccggttcagttcaattcgggaccaatggaattcatggccgcggatgcgggtgaaaggcagcccgaacggggctcccgtttccatcacggcttcccggtatcccagggaacggagtttttcccccatccgcgccgtcccgtcaatgacgccgcacatgttcctgcttgtcccgtccgggagcgccagttcattgcaaaggtacatgtaaccgccgcattcggcaaagatttctccgccgttcttggcaaagtccaggatggcgttccgcatggcctcattgctttccaggcggcttgcgaaggtttccggatagcctcctcccaggtagagggccctggttccttccggcagggcggtgtcttccagcggagaaaagcaggtgatgtcccagcccgtttgcttcagccattccaggttgtccccgtagtaaaaacagaaggcattatcccgggctacggccagaatcccgaggggaggggcgggcggcaggggaactttcagcggctccggacgtctgcgttccgtgatgttcatcagcagttcccagttgacgcgcttttctgcctctgccgccagccggaggaaccaggattgctgccgggcttcctcttccgcgggaaccaggcccagctgccgttccgggagcgtccattccgcgtttttggggaacgccgccaccagcggcggcatcctgtggtggtccagcgcccggcgcagaaggtccgcgtgcgcggcgcttcccacgccgttggcaataactcccgctatgtttaggccgggatggtgctgggagaagccgcggacgacggcggcaatggaccccgccatgccccgcgcctgaaccaccagcaggacggggaggccaagcgtaagggcgcagtccgccgtgcttccttccaggctttccggcgttctggcgtcaaagaggcccatgaccccctcgcaaatagcgatgtccgcgcaggaggcgtgccgtgcccattgggaacggactccgtttttccccatcatccacgtatccagattgaaggaaggcaatcccgtcgcctgccggtggaaggaggggtcaatgtagtccgggccgcacttgaaggcctgcacgcgtaatccccgggcggagagcgccgccatcagggcgagggataccgtggtcttgcctcccccggactgggtggaggcgatgcagaaggcgtgaaaaggcttattcatgggaaacaggcaaattctgcggatgctgtctttccggatcaggtcaggatattccgtatttgtcggcgtagcctctccgttcaaaaaggacgtctccgtccctgatggtcctggggcctcccagaagcaccagcgtggacatgtccacgtcctccagcgggaattcgtccagcgtccccacccatttccgttgggccgggcgccccgcgtgcttcacgtaggcgcagagggttttccccccgcgttggttccggaagatgcgcagggcctcctccagcagatggcggcgtttgcgtccggcggggttgtaaaggaccacgggcagcgccgttccggcgctttgctccaggttggcacggatttcctccgcagggaccagcaggtcggacaggctcaacaggcagaagccgttctggaggggcgcccccagcgcggaggcggaaatgctggccgccgtaattcccgggagcacttcaatgcggaccggggaaaagcgttcgttttccttcctcatttcgtagagcagcccggccatggccaggatgcccgggtcaccggagcagaccatgcagacattttccccgttcagagccgcttccagcgcggccgtgcaccgcggcacttcccccatcatcccggtctggatcatctttttcccgtggatgcgttcccggatgaaatccaggtatttggtgtagccggctatgcaggtgcattgctccatggctgccgccgcttccgacgtaagctggcccggagacccggaccccagcccgatgacgatgacatttccggctccttgacgggccgtattccggctgccgtgcgggcacgttgccagggccagcgtgacgttcccgccgcaaacggttttaggagtgctgattttacccccggaggccagaatggcggaagcctcggaaacggaatgagtccccgttttttcaaagacggcgtctgacggcgtgggaatttccaccgcgtccagctcggctggctcaaagacatggaaaggcacattccatgttgcggccagggccaggatggccggttcctgctccttgagcgtgcaggaggcaagggctttgatacgggaccgggagattccctgccgggcaagaaagccttccgcgtattgctgcagcagcccgggttccgttccttttttgcagcctattccaagcacgaaggaggatgactgaataagcagggcggcagctccccccgcagattccgggggctcttcatcccaatagacggcgggaacgtgcggtttttccgcggcttccgctccatccgcccgcgccggaatgacctggggacagtcccgccagtaccgttcgtggatttcctgcggaccgtgaaaagatacggtgtctccggcaagcagggccgcattcagggttttgatggcgtccgggttgagaacgcaggccttttccctggctgccgcttcgtcaaaggcggtgattccccgcgtgtccgtggcggtggtgatgacggcctccccgccgctgatgcgggccagcctgcgcgccaggcggttgccgccgcccaggtggccggaaagcaggggaatgaggtgggagccggactccgaacagcaaactaccgccgggtccgtggccttgtcccggagcaggggagccgttttcctgacggcaattcccgtggccccgatgaaaacgtgcgcgtcaaacaggttccactgccgggcaagcaacgagtcgaagtcctccggggcaacccgcgtgactccttccgtttccccggttctgcctacggaatggatgacggctttctccagggactgggaaatctcctgcgccttgcggactcctttttccgtgaaagcgtaaaacgcgcagcttccgtcgaaccgttcgtcttccttctcattccggtagccgtggctgaactggccgtggtagagcagggactgcccgcagccgtgcgcgccgatggcgtctcccaccagaatgagagcctgcctgccgatgcccgcgcgggccgcttccgcggcaatggtggacagggtgccgcggatgattttttcatccggccacgtggcgcggtacaccactgccgccgcggtatcgggggatttcccggcggagaccagccgtgcggccagttcgtccagcttgcccgcgctgaggaagaacgccagcgtggctcccgtcccggcaaaggcttcgcaggtttctcccgcgggcatgggcgttcttcccggggtgcgcgtcagcaccaggctctgggcgagtcccggataggtcagttccgtgcgcagggccgccgccgccgcaaaaacgctgctgacccccggcaccacgatggattcaattcccttcttgtccagaaggtcgaattgctccgcgacggctccgtacatggaggggtcccccgtgtggaggcgcactactttttttccttccagcacgccccgggccatcacttccacctgttcctccaggttcattctggcgctgtcatgaagttccgcctccgggcggcagcgcttgaggtgccccgggttgaccagggacccggcatacacgactacgtcggcctccttcaggagggcggcgcctcgttcggtaatcaggtcttcggctccggggccggctcctatgaaatggatgggaaaacgggggatattcatgcgcgggaataggtaaaaagggtgatgcggttgccgtgccgcagatggtggtaggttccagcaatgggagattcggaggcgatgtccagggagaacatccccgtgcgtgcggcggcgttccagccgtaaagcaggtgctcgctttccgtggttacggcggaggctaccagaaggccgccggggttcagggcgtcaaaacaggcctgcatgatggattccagcccggcgccccctcctcccgtgaaaatgcggtcgggcttgggcaacgcgtccagggcctccggcgcttctccctgcatgcaggcgtaattcacgcagcccaggcgccggcaattccggcgcatcagttccaggcggccagtctgccgttccagcccgtacacggaaagtccggggcgcagggcggcggcttccaggccgatggagccgctcccggctcccacgtcccacagcaccccccaggccggaaggcgcagcttggacaggatgaccgccctcacttcctccgccgtaatcaggttattctccttttcataaaaatccgcgggcagtcccagaggcaggacgggcgcggctccggggcggttgtccggcagcagcaggagcatggaagtaggggagcattcctccttggccagctccgccagggttccttgcagaatgcgctcgtcagccattcccaggcattgggccgccacggcggaacgccccgccgctgacggatggaactccatggccgccgcggccaggcggcaggcggtgaagggatggcctccgtagatgacggcgagcggctgggccagaatttccccccacggaatatattccgtgctgtgcgcgctgaagcagcgtgcgcggtcccacgccatgcccaggcggtggaacagggcctggaaggacgtgggggcggggacgaattccagccggtctccgtcacaagccagggcttggagcgtgccgcccatgccgtggaacagggcgtctccggaggccagcaccaccacgttgttgccgtgccgtgcttcttccagggcttcccgcgcctgttcccgcgcgtttttgccgatggggatgcgccgggcgtcggaagggggacaggcttccagcagggcggaggaggcgtaaatgctctgtgcctctgccagtttgccaagcagggccggggacggttgaagcgggcctgtgccgcaggaaaaaacagtcaggggtggcatggaggtatgtcgagaaggaggttgccggagaagccggaaatcaggaaacggacgggaaggccgggcacgtggcgctggaactggcgctgcgcttccgcggcgaggtcgcggtaaatggaaaggtgggcctcttccggcgtcagggcgagcgcctggcggacggaagaacaggccaggatgccccggcgcgcttccccggaaagcggcgcatggcgttccgccgtgcggagaaagagcggcatgtcctgggccaccttgtgggcgtgggtgttggcaaatccggcggcgtacttgcagagcttgcccggcatgcaggccactacggcttccgtcatgccctgttcacctgcgctctggaggctttccgcaatgaaatccccaatgcagatgaaggaaatggaggggtattccggcaggagggtcttcgccagcgcggcggtgcggcccccggtgcagaacacggccttcctgaagccggaaagccgggtagagcgcacgcagatgcggatggtggcgatgtaggcttcatggctgtacgggcgaacgatgccgctggtgcccagaatggagatgccccccaccacgccaagcaggggattgagcgttttcccggcgagcttttccccgtcccgcacggaaatttccgccagccagcacccttcccgcatgccggcgcgtgccaggttgtccgcaatcatgcgccgcggtccgtggttgatggcccatttgtgctgctcgcagtccaggcccggcagcgtgcacaggcctatgcctccgccggagcgcaggatgaggagggcccggccaatgggcaggagataatcttcccgggcggcctgctccggcacggctgcgcttacgcgcgcttccagcacggctccatgggtgcagtccgggtcgtcccctccgtccttgacgatgcgggcgaaccccggcgcgcagtctgccagcggaagcgttctcgtctccccgtccgggaaaagcaggggaagcggtccgttgatttcttccccgttcagcgttttccatgcggccgtgatggcggcggcagcattggctcctgtggaaaatcctttccggagcggctggcggaggggggcggacatggatgggggacggctttttggaatgcggaaaacttaggaggcgggcaggttttccagaatggcgtgcagggtggtcacggccagggcgctcccgccgcgccgcccgtccaggacaatctgcgggacggggcacgtcccggtcagcagcttggattccacgacgttgacgaagcccaccggcatgcctacgatcagggcaggcctgatgccttcctccagcgcgtaccgggcgatgcgggccagggaaaggggagcgttcccgatgaggacgatggctccgtccaggatggggcgcgctttttccgcggcgcagatggcgcgtgtcctgcctgtggatttggcctgttccgcaatgtcggcatcggaaatatggcagtggatgtcctcccgtgcgtagccgggatgggcgcgcctcagccgttccacggaaagtccggcgcggatcatgttggaatcgcagaagatggggcagtgcctgcggagcgcctccagggcggagggaatgggatcatggcggaacgccagcccctcgccgatggaaaggtccgccgtggtgtggatgagccgccgcatgaccttccattcggcaggcggcagctcttcccagccgtggaactcccgttcaatggcggcaaagctctccgcctcaatggcggcggggggcatgtcccagcggatgttaaattcagaggtcatgagaagtcagtgggtatagtggatgaaaagtcccgtcagggcaataagaaggatggccccgatcatgcgggaaagctgcatgaccaccacgatggtcagggcgtcccgcgtggggaagatgcccatggcggagggaaggttgcgccgcagggcgcggatggggttgccgatggcgctggctaccagcatggccagcagaatctgggaggaggtgaccatgccgtggctgcggaggttagcggccacccctgcggcctggaccaggccgcccatctgcgcggcgacgatgctcatgagctccgcgggaaaaatgcggttcacccagtccggcacatgttcctcccaccaggaaaacaggccgtttttcatcagccattccacgccgatcatcagggggaccgtcaggcagagcatccggaaaacaagcgccagcacccgcaggcacgtctggcgcagggatgtgcgccattccggggaggcgtgccctgcggcggccacggcgccggcattcccggaatccggcgcggcggcggggctcttcctgcggtggaggaacagcacggccgctatgaacaggaagccgaagcccatctgccacccgaagtagcagatggcgggcagccccaccgcgccgatgaccggatacgccacccgcagggagtgggagacgtaggaaaggtagctgttcaccatgccgcccgcaatcaggttggaatgagtaattttgccttccgcgtggctgctcaccagcatgccgttggcggcggcattggaataaagcgccgtggggatggacaggctgatgatttccggcaggtgggcccagcgggccagtccaccgaacagcttgcccagggcaagatgccagcggaagatttcagcaatgccgccgatgaaggccgccacggccaccaggccgatcaggctgccaatctggggaaggcgcgccagaatttttcccgcgcctgtctccggaacctgggtgttccgggaatgatggctctttttgggcggcggggcagggctggaagcggcggcttccgtcttttcccctcccgcctgcgtttcccgggtggattccccggcaggcttcatggctgtgcgggcttttcccgatcccccggcgcccatgccggcgggcatgtggaccaccatgactccggaggctgccagggccagcgccagccagagccagcggaggggccggcgccagggataggtgcgggagtgcctggtgcggttcatgccttcttgacgaacatcagggaaaggtattcttccggccttgcgtcaatgacgtcgatgtcgtccgtaataaactcgtcgggcatgccgagcctttccccgtaaatgacgcggatgtccttttcccgccggatgcgctccatcaggcgcgcgcggctgcggtaggtcttcatgagaacggtggtggttccgggcgggaactccagggaatccgccatctccggcttgaaggcgggaatgacccggagcctttccccgttttccaccagtatttggcggctgcgggccgccagggtgcagaaggaggtgatgcccggcaccacttccgcgtgcaggccgggattccggctgagcaggaggctcagaatatagccgaaggtgctgtaggtcatggcgtctcccagcgtggcaaaggcgcagtccaggccgcgggaaagaactccctcaataatggccgtattcttttcaatctgctcctgcctggtcctcgcgtcgcgggacatgctgaaaaccagcttgcggaactctgccttcacgccgcccacggaacgcaccaccgcttcggaaatgctgaaatcgctgttgggtccggtcaccgtaaacaccacgtccacggagcggaagacgttgacggccttgagcgtgaggtattccggatttccggggccgatgcccaccccgtaaaactttccagggctggccatgtcaatgcgcttgtttgggggtcatgaggtcgtcctccgtggtccgggcatggcgggagaaaacggcgcggatgcccgggttttcccccagcccacgcagatgggtcttgacggtgaagccctccttcctgagcatggaagcccaggaatcctcctcatccccgcccaggtcgttcttggcgtggtctccggccaccagcatgaagggggccagccagacggtcttggcgccggactttttaagctgttccagaatgggggccaccccccgcgttccttccacggtggcgaaaaacgccaggctgtcgcggtcgttcagctcgcgggcgaagtcggaaagcaccatgtcgcagcgtccttcctgctggccgtgccccatgagcaggatggcttcatccttcttccgttccgcggggaaatgctccagaagggccgtgatggcctcgttcctgtcccgttcgctttccagcagggggcggccgatgaacacgtggtcaaagctgtccggatggcgcgccaggaaactgacgatctgcctctccatccgggaaaactcctcgccgggggcgatgtgaagggactggacgcgcaatgtgcgtatgcctttgcgggccatctgttccagattttcctccacggagggaacgggggttccgcgtccggcaagcttcctgcggataatgcttgaagtgtagctccacttcaggcggtccggggcataatgggccagcatgtccttctccagctccttgtaggagacggtagcgtcctggtggctggtcccgaaggccacgagaagaagcccttcctgccgtgacggcgccgcctgttccgccggggcgggggacgcttccgccctgcatggggcggcggaaagcacgggcagggaaaacagggtgagtcctgcaagaaaaacggaggaaaggggcaggaatgcccccggaaggtaagaggatgcttcaatcatgcgttgatgaggtatggtgaaccggagcaaggatattcggactccgggtctccaacctccccctcgccttcaccctccggaatgggaggactggctgaccggaacactggcggaaaagcgttccttgagggtttgtaacccgataccgcagcgcgactgtttccggttctcacggaattccccgttgcttcggcgtgtttaatggcgtttttagccgtcactgtcaatgtttattagaacgccgccgaatttccggaggctgggaaaaaatgtgcgtggacgggtaaaaaccgccttttggccgttcctgcgcctgcttttggaaaaaatgcagggttccggatgcggaagcggtggaagacggggcattccggggtgcagaaatcccggcggaaaagagagggaggaagcgccccattccgtaccgtgcctgggctttccaatccggtaggccgcaggccggagtttgctgcttgcagaaggcggggcaggtatgagaacatggagcatggcttcttccccggatgttgtagaatatatctgtttccagctccggcatgccggggacatttccttcaaaaaaatgtttggggaatacggcctgtactgtgaccggaaatatttcggcctggtatgtgacaaccaattatttgtcaaaatcacggagccgggcctgaagctgcttccgcagcaggagcagggcagtccctatcccggcgccaggccgcatttcctgatgacggaactggatgatgaccgggctctctcctcctttgtccgggcaacctgttccgttctctccgctccggatgtcttatccgggaagaagaaaaaagcttccggagaaaaaagaaacaggcgtccgtaaacgcctgtttgttccggatgaaatgccgttcggctgaaaggcttatttatcttccggagcctctggcacagccagggaagaaaggctctttttcagattgcccgcaacggtctgcgtggcttcattatcggactccgcgaatttgtccacggcctgcgtcagggatttgaggtcggattcagaaacctttctccctttcgccttgcgctgttccagggcggaaatcttcttgttgaggtcggccagcttcggcaggtccttgttcgccttcagagtcgccagcggttcgtcgaactccttgacggaggggaccgccgtcttgaggcgcgtgatggccgtcaccgcttccagcgggttggactggatctgggcctgcaccatgtccttggcgtctcccagccattcgtcaaaagcggcgcagacggcctgggcctcctcgtcgtccgttttcttccgcaggggcgtaatcttggactcgatgttgctgccgttggaaacgactgtcttggccagggacttgtacttgtccagctccatgccttccaggatgggaaggccgcgttccaccttcatcacctcctttttcaccaggtcgtaaagctgggtgggatgccccttggccaccacctttccgttggccccgatcagcaccgcatgcggcaggccgcccgggcaggaggccgccggaatatccagcccctgatagacggggaaagtaatcttcttttcctccaggaactgcttcaccctgggggtcagcccctggcggtggctgccaaccacggtgaaacccttggactggaatttgtcctgtaattcctgcaaatgcggcatgctggcgatgcagggagggcagttgatgccccagtattcaaaaaacaccaccttccccttcaggtcggaagccttgattctcggcccgtggaggtggctgccttcgtcaaaggatgggtaggtgactttggcgccgttcccgttgtccgccgcgtggaggaaagccggggccgtcatggcggcaatggagccggacagaatgagggcagtaaaggttttcataggatggatgatgcagaatcccgcattgagtgtcaagaaggaagctcgcgccccgcgctgccttctccggttgtttcctcggctgtcccgcctgttctgtttcgacgggctgcgcacttccggtccggggaagcccggcggcccgttcccgtgggaaaaacgcttcaggcaatatccagccccatgatgtaatccgtcatgtaataaccgtggccgatgtggaaatccccgcgttccagttcccgcatccccatgcgccggtaaaactccaccgcccgggtattatagcggttcacgttcaggcgcatcaggcacggttccgggtggatgctcctgatgtagctgacggcctggcggaacaggtagctgccgatgtgcagcccctggaagccgggcagaacataaattttctgcaagtggaagacgccggggccttccggctggacggacaggtagccgcagtcctccccctgatgggaggcgatgaaatacacgtgcccttcctccatctgcttctccagattggcgggggaatacatccagtccatcatgaaatccatctgctcctgggaaaggaggtcccggtaagtggccggaaaagcctggagggccagttcatgaatcagcatgatgtcgtccttggcggcttggcggagtgttggcatggcgggaatattacacggaaaagccccggatgaaaagggcctcttccacgttcccggcggaattttccgtccatggcccactttcccctccctattccgccggggacgccgtatgctggatgacacaggcttttttgacggaaaccggggggaaatcctgtctgtattgtgaaccctgcatgcatgccaaatcatgagagaacccattcccatacaacaatggctccccgcggggccgctgagggacatgggtgaaaaatacgtgagcggccttccggacgtggcgcagaaccccatcggcccggaatccctcatgcaccagtccgaccactcctggacggaatacctggtggcctactccctgctgtatccgtgggtggtgatcgcgctgggcctcctgggcgggctggccctgggggcctactaccttttttgccgccgccgggaatacgaccaccgcattttctgctccaaatgcggcaccatgatgtacccgtgcggcctgcactgccccaagtgcggcacgcccaatcccaaaccccgcgccctgaactggattggttattccaggctgcgcaccgtgattccgtccaccggatggaaaaggcatgaggaagtcctccgcagctaccggcggtgcttctactgcggccagccgctccatgagcctacgctgaaccagcgctgccccgcctgcggaaaagcggtgctccagggggaacaatccgtggaccagtatgatgcgtatgttgggcgccgcaggggctggacctttgcggccgtggtcgtgctgggcatcattcccatcctggggccgctgctggcctcctccctgtacaagaggacgctcatcaacccgtattccctgtacatgaccgtattcagggaaagcttcctgatggtggtgctcttcctgtgccgccacctgttccgcctgctgccgttcatcggaatcatcggcatgcccgtcctctgcgtgacggaataccacctgtaccggcgcatgttcctgtggaagacggagaaatatgacttcggcgagaagtaggggtggcctccgggcgggagcgtcttcccggggcggcctttccggtgcatccacgggaaatgatgggctgcgggattgacttggaatccgggccacgtacctttcctccatgcagatgcgttatgtcctcttgcccttcctgggagccctttgcctggccctggccgcctgttccgtcacatacggcaacaaatccgtggcgtccccggaagtatacggcaggctggcgccgggaaaatcctccaaggcggacgtttacgacgcgctgggccagccctccgacgtggtgaccatgaaaaacggcgtcttgtggacctaccgctaccgcaaggctaaaaacgacttcctgggcaatattcccctctttggcgtcggcctgattgccggagggaaaaacggagacgtttatacggtgctggccctgtttgaccggcagggcgtgctggcctcccgcacggcggcgcggcagaagctgtacacctccaatctggcctccctgaaacgttccctggacgtcatgatggagggcgaatcgtcacaccggcgggtggaaacggagatgaaaaaaataggcaggccctttgacccctctgcggccaaggatgcggacctgctggaaaagtctcttgattaacggcctgcgggctttctcttccttattgtatcaagtatgacaaggaatcgtttttttctaatggactaaacttactgcatacagtaagtaggcggcgttccccgaagggatacggcagggattcttcctgaatgcctccgctcccgggggagcaaaccctatagaaaaatagaatgaaaatgaaaagaaaactggcattggttctggcgaaggctttctccggaaagtccgtgccggaaaagaaacgggaaaaagaggtaaaggcctccaggaaactggaagcatggctgaaggcttccagaatgcggtccttctagaaaaggcctgctgacggaaaaggcggattcgggcgctggccgcccggttcgcggggagggacggggagaaaaaattgagtctccctttttttcatcgtaccataaaacgatgaagcgcgtgaatgggacgatggggacggctgggtcctttgggacggagagggaagggaggacagatggatgacgggcgtttactgcctaagggaggcggctacagacggcttctttcattccgcaaggcccaaatcatttacgatttgacggtagctttctgcgacgctacttgagtcgtgatgcgcgtactactgatcagatggtgcaggcggcgcgttccggcaagcagaatattgcggaggggagcatggcttccgccacttcccgtgaaacggaaatcaagctgaccaatgtagcccgggccagcttggaagagcttctgctggactatgaagattatttgcgtacgcgcggattgagactatgggataaggattctcccaaatctctgtttatgcggaaggcctccctgcggcatgaccattcggaatggtttttaaatctggctcattccagaaacgatgaagtgttcgcgaatatggcggtttgtctgattcatcaggccgcttttctcttgaaaaaacaattgaatgtactggaagaacggtttttgcaggagggaggcttaagggagagaatgacccggctgcggaagcagaggagaaagtcgggaagctcgtaaaagcaattgtctcaccggtctcattcgtcccaatggtcctcccgggcaatttccgggctgagttgcgggtcaaaagatatgtcttcatgacagttgcgccttgactacggcgttggaatgtccgttcatctgggcagacatgaccatacccggaattcttgaagaaaagttgtctgccgcgttgaaggcggtgttgggggaggagcttcccgctgatttttgcgccagtgtgacgccgtccgcggatttgcggttcggggactatcagagcaacgccgccatggtgcttgccaagcggtgccgcacgaatccccgcgctctggcccagcaggtggtggaccggatggggcaggacggcgtctgctccctggaaatcgccggacccgggttcatcaacttccgcatcaagccggaattttacgccgcgcgcctgctggccatgctggcggacgaccgtctgggggtggagaaggtgcaggaccccaaaaccatcgtcattgacttctccgcgcccaacgtcgccaagcccatgcatgtgggccatatccgctccaccatcatcggtgacgccctctcccgcgtggcccgctttgtggggcataacgtgattacggacaaccacatcggggactggggcacccagttcggcatgatcctgtggggctggaagaacatcttggacgagcaggccctggcggccaaccccattgacgagctgctgcgggtgtacaaggacgtgaacctgatgtgcaaggaaaagccggagctgctggacacctgcaaggcggagctggtgaagctccaggccggggacggggaaaacctggcgatctggaagcgctgcgtggaagtctccaaatccggcctttccaaaatctacgaccagcttgacattcactttgactactggctgggggaaagcttttacaacgacgccctggctccgctggtggacggcatgatcgccgccggaatggcccgggagagcgacggcgccatctgcgtgttttccgacggctccgtgccgcccaatgaagaccccttcctcgtgcaggacaagggggaatggcgcgccaacccctgcatcatccggaaggcggacggcggcttcctgtacgccacgacggacctcgcgacgctggaccaccgcatcaggacgtggggggcggattccatctggtacgtggtgggcgcaccgcaggccctgcatttccgccagatattctccgcccagcgccgccgcggcatggatggggactaccgccacatcgcgttcggctccatcctgggagatgaccgtaagccgttcaagacgcgttccggggacaccgtttccctccaggacgtgctggatgaagccattgaacgcgccgcccgcgtagtggaggaaaaaagcccggacatgccggaggaggaaaaaaagcgcgtggcggaagtcgtgggcataggagccgtaaaatttgcggagctctcccagaaccgaatgacggattacgtcttcaactgggacaaaatgctggccctccagggggacacggccccgtacctccagaactcctatgtgcgcgtccgttccatcttccgcaagctggacggcagcccgctggactggtccgcccccattcagctttcagaagatgcggaaatccacctggcccgcctcctggcccgctacggggaagtggtgccgcaggtgctggacgactgccgcccgaacgtgctggccgcctacctctttgacctggcccgggccttccactccttctatgaggcgtgcccggtcctgaaatcggaaggggcggtgcggcactcccgcctggccctgtgcgagctgacggcccgcaccctcaagcacgggctgggcctgctgggcatccagcttccggacagaatgtaaccgtttcttccttatgaacgcctctttccgccatgtcctgctggctgccgccatggcgggattctgttccgctgctgggggcggggaacacgggtactggatgagcagcccgtccctgaacggctggcgggaggccgtcttccgcgccggcgttccggcacagcctgccgtgctgccgcccggcgtggagccgatgatggtgggctcctcctctcctgccgcgcaaatgctggtgctggagggaatgacgcatctgctcaccttcggggacatgcgtgctttccggaaatttgacgccgcgctccggctggacccggactgcctcatggcccactggggcaggtgcatgagcctgatgggcgccggacccgcttttcaggaccagcgcgtccattccatgaagcgcatgaaggagctggcgctgcgtccggactgtccggaacaggaacgcgcctatgcggacgccctggccgtgctgctgatgaacgggcccgtgaaggcgcaggaagcgtggaaaaccatctgctccacctggaagcgcgacccttacgcacccctcttttacgccatgctcctgcgggacggctttgacgggcagggcaaccccggagaggggcagaaagaggccgtccgcgtggtggacgccgtcctgaaagaacgccccggctcccaggccgccctgttcatgcgcgccctgctggaggaagtggctcccgtcatttccccggaaacggtggaaaccgcccgcaaggccgtggccgccaaccccttctccgcgtccgcccatcatctgctgggccattgcctgttccgcacgggagactatgaaggggcatgcgccgccttcaaggactctgaaaacctgtgcctggcctgggaaaaggcggaaaacgttccccccgcgctggatgacgcctggttccgctccatcctttaccgggccgtttccgaattctgcgccggacattacaggcaggcgaacgccgtcgccgcccgcgccgcttccgttcccctggacaaaaagcatccgctggcccccggcaccctcctgcaaatatgggaggccaggacactgcccgcgcgcctgatgctggcccggcctgacctgcccgcgcaggctcttgtgctcaaggcttctccgggaccgctgcccaagggatttccggacttgagcaacggcatggcggcagtggtcacccaatacatgggcgcctgttactctgccaggcagggcaggccgggcgccgtggcgtccgcctttgacaaactgtccggcgttctgcgcctgctcatggacggcgcggacgccgcccggcggcagatgagcgtctcctactgggctcgctgcctccagatgggaagcctgtattcctctgaaatccgctccctcatgttcccggactccgccagcgtctggatgtccgaggccatcgggagccagcgcttctcctccctgctgctgccccccgtggtgccgtaccccgcggaatggaagctggcccgcgcctatctgaaggccgggaaataccgggaatgcgcggacatgtgcgaacaggcgctcaaacgcttcccgaaccatgccggagtgctggacacgctgaaacaagcccgcgccgccggaaaataatccatcctgccgtttctcatggaacggactggagactccgtccccggcagacgggaaagggactgggatgaataaaaactttggaaaggcgaacaacatggatatttacgaaagactgaaaaacggagaaccgatcaacacccgggaatccagggaattcaaggaaatactgtggccggaaacggtgagaagccgcacgctttgccagaaaatcaattcgctcccaccgtttgacggggaagtgcgggcgctcgtgaatgaactctttgagggcaggttcccggaatcctccaacatctctccccccttccagattgaccgcggacactgcgtctcggtgggcgagcgcgtattcatcaatgaaggcctggacgtgatggccgcgggaagcgtcacgatagaagatgacgtgctgatcgggccgcaggtctccatactgacgtccaatcatgatgccggcaacttgttcatcttgaaaaataagcctgtagtgataaaaaaaggggcgtggatctgttccagggcggttctctgtcccggcgtcacggtgggtgaaggggctatcgtaggcgccggctccgtcgtaacgaaggatgtcggtccgcataccctggtaggcgggaaccccgcagcattcattaaaaatatttaacaggcaaacgccgctcctccggattctcctaaaacatggtaaacttcatcttttcatggccgccgcagggaaggccggagctcccatgaactcctgtattcccggaataaggccatcttcattttcaataacaaatacatcaagcaacatgaaccatccctatctggacccctacttcctcgtttcctggtcacggcttacgccggacgccatcaagccggacgttacggaagccatctcccgcgccagggcgaacatccaggccatctgcgaccagccgctggactccctgacctatgaaagcaccttcggcgctctggaaaaagcctctgaggaactgcacctcggctggggccgcatcatgcatctggactccgtcaatgacgaacccgcccagcgggaagccatcggggaaatgctgccggaagtggtcgccttctcctcctccgttccgctgaacccgtgcctgtggacggtcctgaaagcagccgcggcctgtgactgggtgaaaaacctctcccccgtcaggcagcgcttcattcaggaaacgctggcggacttccgtgaaagcggggcggacctgccggacgaggtaaagccggaatatgcggaaatagaagcccggctctccctgaagaccaagaaattcgcggaaaacgtgctggactccaccaacgcctgggaactcatcgtggaaaatgaagcggaactctccggcctgccggactccgcgaaggaagccgcccggctggacgccctggccaacggccacggcacggaagaagccccccgctggcgtttcacgcagaaattcacctccctccagcccgtcatgcaatttgcggactcggacggactgcgccgtaaaatgtgggaaggctcctgctccatagggaaggacggggaatatgacaacgaggccctcattgcggaaatcctggaactgcgggataaaaaggcccatctgctggggtatggatgctttgcggactacgccacctcccgccgcatggccgggagcggagccaacgccttgaattttattaatgacctccatgacaaggtgaagccctccttcctgaaagacatggaagccgtacggcggtacaaggaggaaaaaaccggaaaacccgtggaaaagctctccccgtgggaaaccgcctactggtctgaaaaacgccgccgcgagctctactcctttgacgaggaagatttgcgcccgtactactctgtggaaaaggtgatggacggcctcttctccatctactccggcctgtacggaatcacggtaacgccgcgccctacggtggcgttcaagcccggtgaatccggggaagtgccggaaggcgcggtggaagtatggcacccggacgtcctgttctatgaactgcatgatgcggaaagcggggaacatctcggttccttttatgcggactggcatccgcgggactccaagcgcgccggagcgtggatgaactacctcagcgtgggggaacccccgcgcggcggcaagccccgcgtgccccatctgggcctcatggtcggcaacatgaccaagcccgttggggacaagcccgcgctgctgtcccaccgggaggtggaaaccatcttccatgaattcggccacctgctgcaccagctcctttccgatgtggaggtgaaatccctggctggcaccaacgtggcctgggactttgtggaactgccctcccagatcaatgaaaactggtgctgggagcgggaatccgtggacctcttcgccgcgcactatgaaacgggtgcaacaatcccggacgaactgttctccaaaatgcgcgccgcccgcaactacatgagcggcacggacttcatgcgccagctctgcttcggcaagctggacctggagcttcacgtgaactggccgcggtacaagggcgctccgctggaagaaacggatgaacgcattctggcggactaccgggtgccgatgacggaccgcggcccctccgtggcgcgccgcctgactcatatcttcgcggatcccacgggctatgcctccggctattactcctacaaatgggcggaagtgctggaagcggacgccttcagccgcttcctgaaggaaggggtgctgaacccgcagaccgggcgcgacttccgccgctgcatcctcagcaagggcaacagcaagcctgccgcggaactctaccgcgacttcatgggccgtgatccggacgcggaagctctgcttgtcaaatccggcgtcctttaaatcaatctctctaacacaatcctcatgcctgaacaaaaaagactctccctcgccggcatcgggtgcggctcccgcacgcgcacctacatgaagctggccatggaacaaaaaaaccgctaccgcatcgccgccgcggcggaccccgtaaagcagcgcacggaagccgtgcgtgactttgccccggaggaggagcgggactccatacgcctgttcaaggacgccgcctccctgctggaggaaccgcgcctggcggacgtagccatcatcggcacgcaggacgactaccactatgccccgtgcaaaaaggccatggagctgggctaccacgtcctgctggaaaaacccatcgccaagacgctgaaggaagcgctggaactgcgcgacctggcgcgcctgctgaagcgccgtgtggccgtgtgccacgtgctgcgctacacccagttctaccgcaccctgaaaaaaatcatcagcagcggggaaatcggggacgtcatcaccttcaacgccaacgaaggcgtgggggcgtggcactttgcccactccttcgtgcgcggccactgggggaacagcaagacctccacccccatgatcgtggccaaatgctgccatgacatggacatcctctactggctcatggggcggcgcaaatgcctctccgtagccagcttcggggagctcaccttcttcacgaaaaagacgctctccgctccccggccggaacgctgcacggactggaccaccccggtgggggaagacccctgggacgcccgcaaatacgccacggacgacgaatgcaagcgctggctgggcatggtttacgaccgcgcgcaggaagccaccgaggaggaaatctgcgaatggcttgaaacctccccgtggggcagggactacctccagtgcgacaatgaccagccggaccaccaggtttccatcatgcgctttgaaggcggcctgacgggcaccttcacgatgacggcctttgaacagggccgccatattgaagtatacggcaccaaaggcaaaatccgcgccggagccttctacaaggaaaacggccccggtgaaatcaccgtcacgccccactttggcggaaaaacccgcgtggtggagctggaggaactggctggcggctaccagggccacggcggcggtgactgggggctggtggaagccctttacgatgacatgctgacggttccctctccggcggacatgaccacctccattgaagaatccgcccactcccatgtcatggcctttgccacggaacacgcccggctgaccggccaggtggtggacgtggccgaattcgagcgccgggtcatgagaggtgaactggactactgatccggtagttcaacacttcaatttccagaaaacggacgggaaaccgtccgttttttattgctggttccggatgtggaaccgtagatggctgcaaccatcttcctccatgaaaaacggaataattaatggaattcgtggaaattcagaaaaagaatatttggtcaagtctggaaatcataaatattccggttttaaatgataaaaaataacttattggtcaggacagggttataaaacggacggatttggaatccggtatggatgttacagccgtgaaaaattgttcttcctgatgctctgcaacatttcccatcccccttttcacagctttataccgccggccctgacggctaccgccgccaacatgcaaagacggtcagtaatgatcgccggaacaaaaagaaagcctgttatatcaggaaatccctacggcaatttccaggatattgccaagccaaatttccttaaaacgtttttctttcaattttgtaggcttgactccggattccaaatccggcatatatcttgtgaattggctaaaaccatgaagaaatcattcattctgctattattggcaggcgccgtctccgcggcttctgcggcttccctgaaaattaatctgggttcttcctctgcgggggatccggattggatcagtgtggctacccaggcttcctccatcacgggaggaaaagccgcctcctacgcctccattgcttccttgagcaaaaacgggggaaacgtttccccgtccgtggttctcggcaatctgggcggtcaggacgtcacgctcaccatggcgtacaaaagcaccgccgccatgaatgcgggttacctggacgcgacaggcacgtccccctccatcaactccctcttcccggacagcatggcgcaatcttccatttccggcaagtgcaacggggtgaaggggcagaccgtcggcctgcaattcacgttgagcggcctggcggccaataccacctattatctgtacgttctgggcaacaacggtttctcaaccaataaaaccagcatggccctctcgggcggtgtcagcaatgtcaccggcagcctgatggacggctatgaaggagcgggaacggtgaccggttcaaccttccaggggacgacggattcttccggcgtggggatggaatgggcattcaccacaaacaattcgggccaggtgacgctcacttatgaacgctccgccggagcggccgcggatgtggtaaatgcagatgtcagcttgaacggattcatgctggcaaccgagcccattcccgaaccggccacggcatccctggggttgctcggactggcggcgctgctgttgcggcggcgcaaaaactaaggagcattcagcattatctttgacgagatgtccggaaagaagggatggaaccgcccatgttgttcatccctcctttccggcattttttatttgcagaagtctatctgttagattatttaataatcttatatctatgaaaaagaaatctctcttcggcgtccttgtggcggtggctctctccgttctggggaatccggggcagggtgcgggaacggtggaatcctttggcgtggacttcggcaatgcggcttctgcggcacagccgggctggacgaatatgggggtggtgaccaccacgccatcctccacgctgaaaagcgtgcccctgcggaggaataacctggaagcctcttcctcccccgtgctggctggaacgctgtttggccgctccgtttatctggcggtaacggccaaatcggaagcgagcgtgggaaacatgtgctataacaacgccaattcaacgtggcgggaaaagggggaaacccgcggagggcagccgggcggcgtgctgcaggcggaaagcgccttctcctttccgaatcatggggaagccctgaatacgagtctgcaattgtttaccaacggcatggcggtccgggccggcacggtgcgcgtttccctctccggactggcgcccggcaaggaatatgccgtttcttttttcctgggcagcggcaagcccgcgtaccagtccgtttccctggtatccggcgctcatgtggacgtaaaggcgcttcagacctccaccggttcccgcacggaagacacgtggaaagggggcgtcaacacggcggacgcggatacctatatggcggtggaatggaccgcggcagcggatgaggccgggacgctcgtttttgacgtggtgaaggaaggcagctccgccggaaccggaaccctgaatctgaatgcgctgactgtccgcacggatgatgccccggcccctcccgctccggagccgaagcccgtcagcgtgctccacaacagggcgctgaccgttctttcctccccggtggcgcttcccgtgcctgcggatgcctggaccggaacgggggaaatgacttgtgaactttgggtcaggccggatggggacgccgcctccggcgctattctttccctgggggcttccacgctctccctgaacggaggccgtctgcatctggaatccgggaatgcggaaactcccgcctccgtggaggcttccggccagcccttcgccgccggaacctggcaccatgtggccgtggccctgggaacggaaaacgtcagcctgtatgtggacggaacattggcgggaaccgctcctgccgcgccttacctggcctccatgaaaaacggctggacaggcctggtgctggctgcgcagttcaagggagcccgggacgaactgcggttctggaatgcggagctggggaccggagcggacgactttttcctgacggggccgctgcccatggcccaccccaggtatggccgcctggtggggctgtggcggctggacggagacttccgggacgccaagtggacggaattcgcggataaaacgggcagctccttcacccgcccgtaccaagcggtgacgccgtccggcacggaattctccatcgttacggacaacaacaccttccgctacatgctggtgaccggatacgtccgcgaaagccatatcatgtggaactggccgtcccgtccccacatgatcaataactcggatatcatttacatcggcgccgcttccgccgccgccaatggggacatcagcttttcctacccggacaacgacgtgacggaaagccggggcgtgcagcttctccccgctgacggcgcgcggacgaacgttctgggattcaccggagaagacgcttatatgaacgtaggcaacggactgctggcgggcagcaatgccaacgcgttcacgattgaagtgaacctggctctatccgccggggagcagaacgtcaccctgtttgaaaacgacagcgtgtccatgacgctggcgtgggcggacggccattacaaggcgcgcctgcaggcgggctccacggctgcctgggaggcggacctgcccgccgtagcccttcatgaatacttctggctggccttcatccgcaattccacggcgggaacgggcgtcttttatctgaacggtgcccccctgcaaacggcggcggtcgccgccggggagatgaacggcacgccgaatgccgtcgtgggccggaacctgaaagggaaaatagatgaaatgcgcgtatggcacctggcccggccggccggccgcctgggcacggaagtccagcctaactggaatgaccgcctcatggtggcccgctgggggaacagcggtgtctttggccgtgataccgcctcctgggcggagcatgtgcgcaccctgcgcggcatgacggaaggggtggggggcatgcgcatccgcctgggcattgccggcggcgcgtggagcgccatgctgacgaacgccgccgcccgccagagatttgcggacggcatcagggaactgttgaaaaaatatccgctggacggcgtggacctggactttgaatggctgtaccagggggatggaaagtggaccagctacgggcaactggcccaggccatccgggagaccaatccggacatgttcttttccatctccctgcataccgtcgcctactggtttcccgcggcgtacatgcagtatgtggactacttcaccttccagaactacgggccgtccattgacgtgaatacttataacagcatggtttccgcctgcggaaaattccggaatcagggctttccggacaacaaaatcatcctgagcgccccattccagggaacgcccggaaccgccgggctgcctgacggcaaaaagccgggggactacatcaagggctacagggacatagccgccaactgtccggaagcggacaaccccgatcatgacacggccgtttattcctattccggcctcaatctgacgctccattacaacggcgtcaccaccgtcaaaaagaaagccaaatacatcagcgaccagaagctggccggcttcatgtactgggacatggggctggacgtggcggacgcttccggaagcaataactactttgaccgccgttccctcctgcgcgccgccaaccgctacgtgtcttccacgtcgtttcccgtcacggcctcaccgttcggcttgtcccgggtgggggcgtccgttcccgccgcaggaggggcggtggatgtggaaattcaaatggaagaggaagccctgggctgggtggtggcggactccccggaatggatttccgtttccgccgcttccggcatcggccggaccacggtcatcctgacggcgtcggaaaacaaatccgccgccggacggtccggaacggtggtgttccgcgcttccgacaagcaggaatgcgccgtcaccgtgacgcaggccggggcagacctggcgggctatgacaagtgggtgcaggacaccttcccgccggacgccacggcggaccggacggcggctgatgcctctcccgccggggacggcgtcaccaacctgatgaaatatgccacgggcctggacccgctgaaaccctgcggaagcgtgacgaaggtatccgtggaagaaggcgttgaaggaagcaggcatctggtgctgcggtggccggtaaatcctcaggcggcggaggtaaagcatgaagtggaagtctccccggacctggttaactggacttccctgggggaagtggaaaccgccggaaaaacgtctgccgaattccgggatgcggagcccgtgcaggacagcgccatgaagcggcgcttcctgcgcctgaaagtgacacgggaataacttcagccgccctccttgtggaggtgcctttccgcccctgcttacgccttggaaagcaaaatccgtcccggcacggcatggccggaacagggagcgccatatacccatgcgggcggcccgaacagccacgcatggcagaatgcacgaaccttgaatgggcctcctcatcttaaaaacagggaatgtcccgttgaagaatcgcgctcgctttcctcacctcattcccagccggccgcagaggcctgcggcgctccctgctcccgcaaacccattccggggcattcaccgggcaaaggcgcagcctatttccccgccttcttcttaatcttttccttcacccgctccacattggcgcgggcgtcttcattccccagctccgccgcctgttcataccacttccgggcttccgccagatccttggccacgcccgttccgcgttcgtacatggagcccaggttgttcatggacttggcgtcgtcctgttccgctcccttaatgtaaaactggtaggccagagccatatcctgcggagtgccgagcccttcctcatgcaggtagccgagcaggaaatacatgccgggcacggcatgcgtctggttctgttccagcttggtcaggatgtccatcgccgttttcgggtccggctccatatcctctcccttgatgagcaggcgcgccttttccaccagggcttccgggtctttggttgcggcggctttcagcacataatccttgtgaagctccttgttcggctgcacgccgatcccctgctcgtaataccgggccagcctcttgaggccgcgcacgtcctccttcttcaccagcgcggtggccgccgtcatggcagaggccagcagctgctgccgttccgcagggtcctgcacgttcccggccacggtttcataataattggccaattcgtccagggcggtcaggctgccgagttccacggcctgttcccagaacttcacggcttccggattgatggttttcggggcaggggcctggcgttccctgccggacggcgtcatccagggtgggacggctccggcgtccgtcagcgtatcttccgcgttatccttctgccccggcttgcggagccacggcggggtatttccttcctcgctattcaagctcatcttgacctgctggtaggcggaatgggaggtattccggctggcattctgcgccgccgtttccgccgtatcctggggataggccgcctggttggcgaggaagagcagggagggaatgtggccccgtgccgccaggccgtgcatcatggcgctgtaaggctgaaggttttcattattggagctccacatgtccgccgcgtccacatggcccttcagggccccccggaacatccaggaatccccttccgccatgcgtttttccaggccaaattcgtaaataagggcgcggcccagcacgtacatgccgcagggatccccctgtccggcggaaagccgggcccaggccagggcttccggatagccggattcctcgctcctgtagctgaacaacatcaggtaggccaggtccgcctggctgcgggcgtccccttcctgagcttttttgcggaggctggcggtcagctcctcccactgttccggcgtgacgtattcggaaatgcctctcagcgtaatgaagtccccggaggcggctttcgccaggcagtcgttcagcagcgttctggcgggttccgcggccggcttgtccatcaaatccgggttttccatctgggccaggcgcagcttggccaggggatggccttcttccgccgcctgcttgtaccacgtgcgcatgttctcctgcgcttcatgggctttgcctatggaatccatggtattggccagttcctccttccacagctcgcccagctggacgctggaatccgcgtctccaagctgggaggccagctccagctccttgtgcgttttggcataggggggaagctggttgagctttttctggggaagggaaagcggttccttcaggaagggcatgccccgttcgtcatgaagggccagcaggtccagggcggccttgcgcagctcctgctcctgcggtggcttcgcttcggaaaccaactgggcgtaccaggcataggcattattgctgcccagcttgcgggcctggtcaaacagggtctggagcaggtagccgtccacggttccccttttctccttcatgcagccggagaggtcgcccagcagggtttccaaatctcccctggagcgcaattccgccagaagctttccggactgctccgcggcagtactcttcgtcatctccgccaacaggcgcatggctgccgcgtgtcccttctccgcggcctgggaaaggggctggacggccatgtcccgccactccctgccgtccggatcgttgccggagggccccccgcccagggaaagggccagttcccccatccgggccagaagaaccggtttggcgtttttccggtgcttctccagggactcaagcaccttgccggggtcttccttcagccagtccaccctgataaaggcgagctgggcaagcgcgtcctggtcgccggaggcggctttcttttccagaggggcgaggtagcgcttcaactcggcttccggcagatccgtaacggtgtacagcgccgtgacggcgtccaggtctcccttctcggccagcttgcggcaggcgtccagccattccgcgtgctccggctgcatggactgcgccttgaaaatcccgaaaatcccgtaggggtccgtcatcatgagcttgggagccggatgaccggatttggcggccgcttcacggaagaaatgctgcatgtgctccaggcaggccagcggcaggtccccccggttcaggtaataaagccccatccagtactccccggccagcatgttggcccggaagtctcccgcggcagccttgccgagcaattccccgtacgtccagccgccgtccatgggcagctgggaaaggtcccggaccgggacttgctccacctgcacgggtggatttgcccctgcctgggacggaacgtcctgggcatgaaccggaacggaaaaaataaagggaataagcagaagacgggcacgcatggatcaactcttttctaacaggaaaaacctctgccctacaagcgtttttcacgtgcctgaatgtttaattattgatgatgtcacgttctttttttaaagaagacaaatgaagctgtgacgggaggctccgggcacgtgtgcggcagctcccaagggaaaggataatgatagccgggaaaggcggaatggacaaagtaaacaagggatattaagcccccctgtgccccttccgtccatccagtccatccagtccatccagtccatccagtccatccagtccatctggtccatctggtccatctggtccatccggtccggattatttaaaaaagagcccctggaggatgcgcctcactaaacctcccgcagtttttccgggtattcctccagcagcgcgcgcagccggcggcggtccagttttcccatcaccgtcaggggaatgggcgtttccatgacggcccggatgcgctgggggccgggagcagctgcattccattcgcggcacgctcgttccagcggcacagcggcgggaccgcaggcgaccagctccattccggcccgcgggtgcggaacggcctctactaccgcctccggaacacggcggcgcagcgcatcctggacggcgtccgggtccaccagttcccccaggactttgacgagcctgtccgcccggcgcaggaaggtcagcagacgtccctccaggcgcaccaggtcgcgggtgctccaccactcctgcggctccacccgttccagcagaaaacctccaagaggctgcgtcagcaggcggccgcacagcttgccttccccctggaagcgcaggaggccgtcctcatccgtctttgcctcccagtggggcagcagggaaaggcggtccgtgtggtacggatcgccggggaaagccgtggcgagctgggagccggactccgtcatgccgtagctctgcaccacgggccagccgagggcgcgggctttcctgcccgtctccatgtccagcgccccccctcctacgatgatgcatccggcggtggaaggcgcgcggaggcgcagattgaccaggtccaccacctgcgtgggaaccagggaggaccagcaggccccggagcttttcatcaggtccgcataggcctggggattccacctgccgtgaagcgcatggacggcggtcccggccagggccgcgcgcaggtaaatcatggcgccccccacgtgccagacgggcagggggcagcaccagtccccgcattccgcgtgcaggtgttccagggctccgcgcgcgcagacgtccagggcgcgccgggtgaataaaatggctttgggcggcgaaccggaagaaccggacgtggcaaaggccgtgaccccatccatgccccggcgggaaaggaaggcggcggcctcttccgcccaatccctcaaatgggggggcgccatcacgcaggggccgttgtcccggtcccagggcaggggtgttccggaggcggacatggcggcggcaggctaccggagggcttttctgcgcagggtgtgccagcgttcctccatgcggggcttcaaatgatgctcaatccaggcataggccgcttccaggcctcctgccttgaaggtgcggcctatttccgcttccacgcctgtggcgttgccggtgcggcgcaggaaatcattgctggtgaattcgatgaaaagctttccgttgatcgctccttcctccgccagaatccattccctgacgtacagcgccagaatggcgtcccctacccatgcctccacgcggaggcgttcttctgtggccttgtccatatgatggttcataaaaatctggcaatggcggtcttccctcccagcggatccttgatgggcggcgggggcacaccgggagcctggttcccggcgggggaggccggctggcggttttcccgcggaagctccggcaggttgtccgtgggggtggatgcgggcgcgccgggcgccgggggattctccttgcggtcctgcggcgcgggggcggctcccggcgtaaggggcacgtccagcaccctgtcctgggccgcgcggcggttgaccgcatccttggcctccagggatttgcggagcgccgtctccgattccgaattccagtacccggaatccagttcaatgtaaatgttggaataggggagggatgtcttggtcttgatgaccagcacgttgaactgcttggcggcgtcttcgatcagggaattgatcgtgcggctcatcaattcaaaatgctggcgtcccggaagcactttattgatattattgcggtagcgcttgatgccgggggcgtaatcctccgtaacgctgcgcaattccgagctgatcatgatgcggggcaccacgtgggcttcctcctccagcatgttcagcacgtccagaagcacttcatcggacgtcttgtcggagaccatggtcttgatgccggctcccgtataggccgggaaggaggactccgcaatgacaatccagtttctggctcccacgatcgccaggtttttatataactggtccttccattcccgctctgccgggttggcgtcctggcagccgctgagcaggctgatgatacatacgggcaggatgagggggagtcgggtcatgggagggaccccgccttgcggggctggaaaatgggctagaatttatgggaccggggttcgcggcaggcgctggggcagcggccctgttccgtggcgaacggcgctccctgggtgggggccgcctccgtaaaggcgacgcccggcagttcagtaggtacgccctgaacggggaaatcctttcgcagggggaaataaggatagccttcccacatcaaaatgcggcgcaaatccgggtggccggagaacttgatgcccatcaggtcccatacttcacgctcgtgccagttggcggactggaagatttccgtgacgctgggcacttcctctccgtcgtccaccttcgtcttgaggttcaggttcacgcccgtttccgcctgcgtcagcgtataattgacttcaaagcgggggctttcccccatgttgtccacggagcagaggttcaccatcatgtcaaacccggcggaatcccgcagccagcggactacgtccgccacggcatggcgcgcgacggtcagcgtgatgtcgccccggaactcgtagcggtccgtgatgacgtctttcccaaagcggttctgggcgttgtctgcggcggtcttgatctgtgattctagagaaggcatggagaagaaatggtaaaagatggaacggagtaaaacggtcggaaaaggtttattcgagaggcatttccgtctcgaccggcacgggggcgttggcttcgcgcggttcctccttcttgaagaacgttcgtgcgggctgctgggtatccagcttcttgcggagggtaagcagggcttccaggatggcctccgggcggggagggcagccggaaatgtaaacgtccacgggaataatcttgtccacgccctggagcacggaataggagcggaacatgccgccggtggaggcgcacgcgcccatggcgatgcaccacttgggttccggcatctggtcccagatgcggcggacggccagggccatcttgtaggtgacggtgccggccacgatcatcacgtccgcctggcggggggaaaagcgcgttacttccgaaccgaagcgggaaaggtcataccgggagcaggccacggccatgaactcgatggcgcagcaggaaagccccatcggcatgggccagagggaatttttacgaatccagttgatggcggcgtccagggtggtgtagacaaaattgccttccgcgttggagtccagtactcctgtttcgtaaacattcggttcgttcgtggtgaccatgataacagatgattcttgctgaagccagattagcgagatgccttcaactctcaagccttaatttggttcagccatgattttctgcggcctgttccggccctgttttccgggtgccccggagcggggatgaataaacccgcacagggtttcccccgtgcgggtttttatccaactatattacctatgaaactcagaactccccataatgggtggcggtctctctacctcccgccgcccggtttgttactgatgcaggttagagtcccgggtgggggcttgcgttcaaaaaggagaaaatttttatgacaggcccatggaaggaaatacaggatgctttgagaatgaatgcatcatgtttttactgccctgaaaggggaaatagggggtagacccggtttccctgcaatgttggcgtgcagggtgcttttgggaaggagggaggatgctttatcctcggttatccctgtgccgggaggagcggatgacaaggtgcgcgactagccagaggctgagggcaatagtggctaaaagagacggcatgctttccgtgatgtctcctaacaacagcacggccaggtccgctcccagaagaaggatgcccatgaaacgccagtacggggactccccgtcatgtctggcgcgcggggaaaactctgctcgaagggacgggatatccagcagaaaggaaagaaggtcaaacatggttttgtgaaaggagttggaaggaggaagttggtggatgagctttgttatcggaaggccgggatgttatggactaacttatttacaagggccgggaggcccttgttcccaaaagcgcggtcatgataggaaatccgggatgggacaattccaatgacatgcatgagaagcggtcgcctgggaacgaaggcctcccggccttcttatctaaacttcccctaggcataaccacggcaattttatttatagtcatgattccggagggattggacaataatataagcgatcagccaaaaggcaaagaccatgccgagaacaagagccggcatgctgttcatatgtatccataggagcagggaccccatgacgattgccaggagaataatacccgtccattgacgcctccgggattgttcgtcatccctgccactcccgggaggtccaatcaatgaggataaaatatctttcaaaaaatcggaaagatcgaacataggggcacacaggaagtttaacgatgcaaattcgggaaaggaatgacgaacattacagccgttcctgaatcagcacgtggaaatggcctcctgcgccgtgttcgtccgtcaggaaggcgtcctgcggcgtgttctccgcgtaggggagcaggtaatcccgctgggtcatcagggtgaccgtatcccccaggcagttgcgggaaagctccagcaggtccgtaaaattgacgtcgcaggtcaggtccgtgaggccggggtgtcggtacagttcctccccggtcagcacctggtggcttttatacccgcgcagggaaccctgggggcggcggtagtaaagccgctccatttcgtccccgtagtcgatgaccgtcatgacgcccatgttccagaggggcagccagccggtgaaccagcgggcgtaggaatcgtgaatctccagacgctgccccggctgggaatcatattccagcatgtgggagaaaagcggctgttggcggacggggcgcaattcctcccgcacggctccgtcctttacggtaagccccacttcccgccagccctcttccgtgtactcaaacacgcgggccgggaaggcgtccaccagctcgttggagaaaatgaaggcttttccgccgcagtgcttcagcgccttttccatggtagcataaattttggcctggcttcccagcagaaggtgctggaattcgcgcagccggggggaggactccacaatcacgtaatccgtattcaggcggttccagaaccccagttgctccaggaccttgacggccagggctccggaaccggcgcctatctccagcaggggcagccgcctgccgcagcgggcgcaggcctccttccagcgcgcggcgacggccttcgccagaatgggggaaagcgtgggagtggtggaaaaatccccgcggctcccgatgttctcaatggcggcggagtaatacccctcctgcgggtggtgcagggccagctgcatgaaggcttccagggaaagccagccgccggcggccgcgatgtggtcggaaaggcgtatcatgcggggggaaacaggtcaggatttggactgctccagcatgcgcagcagcggggcttccgccctcttgcgcaggtcttccggcagttccacggcgggggaaaggtcccggagagccaggtacagtttttccagcgtgttcatcttcatgtacgggcaggtgctgcaggagcactgctccgtaggggcgggaatgaactccttgcccggcaccagcttgcgcaggcggtgcaggatgccggattccgtgacgatgatgaaggatgaagccgggctttccgtgcagtagggaatcatcttctccgtggagcagatgtggtcagccagcaggcgcacggcctccgtgcattccgggtgggccaccaccagcgcgccggggtgcttctccttcagggccagaatctggtcccgcgtaaactccatgtgcacgtggcaggccccgttccacaactccatggggcggcccagctggcggcctacccaggcgcccaggttctggtccggcacgaacaggatgggacggtcctccggagcctgggagacaatcttcacggcattcccggaggtgacgatcacgtccgccagagccttcacgccgatggagcagttcacatacgccaccacgtaataattcctgtcggcgttctctttcaggaaggcttccagttccccggcgtcgcaggaggcttccagggagcagccggcgtccgcgtccggcaggatgacggttttgtccggattgaggatcttggcggtctccgccatgaaatggacgccgcagaaggcgatcacgtcgcagtccgtatgctgcgccttgtaggccagccccagggaatcgcccacgtagtcggccatgtcctggatgtccccggtctggtagctgtgcgccagaatgatggcgttgcgttcttttttcaggcgtaaaatttcctctttcaggtcaaaaggtgccatgcgggaaaagatggggggaagcccccggcaagtcaagcatcatgtcccatgcagggcgcacttgttgacggggggcgggaaatgtggcacagtctggcgcatcatacgattatgttttcacttttagctgataaactggataacacgttccggaagctgcggggcctgggcaagatttctgaaaagaacattgcggacgccctgcgggacatccggctggccttgctggaagcggacgtggaatttggcgtggcccgggaattcatcggccgcgtgaaggagcgggccatggggcaggaagtgctcaaatccatcaagcccggggaacagatcgtcaaaatcttccgtgatgaaatcgccgccctgctgggcggagacgccgtgggactggacctgacggaccccgccagaatcatggtagtgggcctgaacggcgcgggcaaaaccaccaccagcgcgaagctggccctgcgcctgaaaaacgaggggcgccgccccctgctggtggcctgcgacctggtgcgccccgccgccgtggaccagctggctacgctggcggaacagatagaagtgcccgtgtacaagcccgctcccggcagccgggacgtggtggccgtggcgcgtgaggccctggaatgggcccggatccagaacgggaccgtgatgatctttgacacggcgggccgccaggaagtggatgaagccctgattgacgagctgcgccacctgcacgccttcctctccccgcgggaaacccttctggtggtggacgccgccacgggccagcaggccgtgaacgtggcccagacctttgaccgggccgtgaacgtcacgggcatcgtcctgaccaagctggacggggacgcccgcgggggcgctgccctctccatgcgttccgtgacgggcaagcccatcaaattctccggcgagggggaaaagctggaccagttcggccccttcgtccccggccgcatggcggaccgcatcctgggcatgggtgacatcgtggggctggtggagcatgccgccgcccgcattgacgaggaacaggccgccaaatccatggaccgcatgatgtccggcaaatttgacttcaacgacttcctggaccagatgaagatgatgcagaacctggggccgctggaaggcctgctgggcctgctccccggcttcggcaaaatcaagaagcagcttccggacggcgcgctggaccccaaaaggatgaagcacatggaagccatcgtgctctccatgacggcgaaggaaaggagcaatcccaacctgctgaacccgtcccgccgccgccgcattgccgccggctgcggccgctccctgatggaggtgaacaagctcatcaagaacttttccgaaatgcgcaagatgatgtccggcaagggcaaaatgggagccatgatgaaacagatgggcgccatgaaggggaaagggggcaagatgcccggccttcccggcatgggcggcggtcttggcggcctgaaaggcctgggcggtctctttggcggccgcaaataggcgcaaaaacggatttaacccggggcgcggcgaacatggccgcgccttttttaaagaaagggcggggggcgccgcaaacccttgcgccggctgaaatgaatacatccgtcaggacgtcctgttcttgggaaaaagaattcaccgccgcccgcctttatcttccgttcccgcaggggcctgcggcgctcctcttttattgaaagaacggaatgctgctccccgtactcccggaatgatgaataaggggcgtttttaccggatggcggcgtggctggctctggccgggttcctgaacgccggcatggcggaaatgctcccggcggaggatgtgctgctccccgctccttccgcatgcacgtccgaccggtccgccgtggcgcatcttccgctgcggctggcggtctatgctcctgaaaaggatgctcccgcagtggaagccatcctgaatgtgctcaacgcccagggcgtcctgtccggcctctccatgacccgtgacagggactcggcggacgtggtttgttcggtggaaggaaaccccgcgggaaccggagaaggatatgaggcgcgtctggaaggaggccgggaaggacggggcgtgctgcatctgaaagcgggggcgcccgcaggcctcttctacgcgtggcagagcatggtccaggtcctgaacgccaaccggaccggggaaggcttctccgtgcccgtcttctccatcagggacgtcccccgttttgaatggcggggcatcatgctggacgtatcccgccacttcttcaccatggcggaggtcaagcgcatgattgacaccatgtccctgttcaagctcaaccggcttcacctgcacctgacggacggccccggctggcggatggaaatcaggaaatacccccttctcacctccatgagcgcgtggcgcgtgccgctggccaacggggaatggaactggcaggaagtgaagctggccattcaggagcatgacccggaggccacctacggcggtttttacacccgggagcagatgagggaaatcattgcctatgcccgcagccgccaggtcaccattgtgccggaaatagaccttcccggccattcctatgcggccatgcatgcctacggggacttgatctgcgacggggtggactttcccgtggaagggaaaaaaggccgggacgccgtctgcatggggcgtccggaaacgctccgcttcgtgaaagacgtggtggatgaactcaaggccgtcttcccgcccggctcccccattcatctgggccatgacgaggtatccgcggaagcatggaaaaaatgcaggtactgccagaaccgtttgaaagacctgaacgagacggatctcaaggccctgagccgggacttcctgcagcaaattgcggactacgtgcggaaagacggttatgacgccatcgtctgggatgaggcaggagaactggaggcggacaaacacatcttcgtcatggcatggcgcggcaatgactttgccgcggcggcggccagaaaggggcatcccgtcatcctggccccgtgctcccacttctactttgactactaccagtcgtctgcccccacggaaccgaaggccatcggtggcctcataccgctcaggcaggtgtacggctatgaactgccggagctgcccccggaggaagcctccaaggtgcgcggcctccaggccaatatctggacggaatacctgtacgacatggggctggtggaatacatggcgtggccccgcgccctggcgctggctgaacgggcctggagcgactgcgacccgcgggactataaatccttccgcagccgtgccgccctggccctgaagcttctggaaaaactggccgtgaaataccgtcccatggatgaagaggattaaggcccctcccgggtggccgttcctttaaaagggttttcatggacctgccgcgccttttccttttagcattcccggacggctccgttctcacgaacggtaacagggaaaacaggcaggaggcccctgtctcctcccgtgcgcttctgataaaaagtttccacccttgtcaacatccctgccgggatatttccggatgcagggaggggggaatttccttccgtttcccttcttcctgaccggggggatgccggaaatctgcgttccctctcctgccgcctcaacgaggaaggcgccggtttccggtcttgagcggtttgtttcctgggttttattgacagcggatgccgggtcatgtatgaaatgactctagctgattgcctgtttatgaagaaacatcggttcctgttcctcgcttccctgatggcgctcgtgctgcttggcggcatggcggtagtggcttgctccaataacttcaagcatgtaccccggacgggcttcgtgactcatcaggtaaaaaattgcgactcccatatcccgtttgatgcctactggaatgctgatgataaaaaaatctggaatgacaaggtaaacggcgtggacggcaaaaaagtcctgatggccgtcgttccggtggatacggtgcacatggatgtgaggccggataccgcggaaggatttgatgccctgcatcgtctggcggaatacttccggaagagcgtcacggccagcatggaaaaggaagttgcggaaaatccgcactttgagatggtgcctccgggaaccaggggggcctatacgctggagctcgccatcatctccatcacgcccacgaacgccaaagccggcatttttgtcacggcgttgagcggcatcaaggggggcggcctggtcaagcggttcatcaaaaagggccacatcgccatggcgggacgcctgcgggatgaggacggccgcatcgtttccgaatttgcggactacgaggaagaccacagcgccctgctgggcgtggataccaaggattttaaaaaatacgcccaccaccagcgcaccattgacgaatgggcccgtgaaattacggatgtgtattcctctacgtacgggcactggacgcagaagcgcatgatctcattcaaccccttttaagggataagcctccgcagaccgtatgcgggggaattgcccggcaaccgggtttctgcaaaaaggaaagaaagaggggcacggacatggggaacgtgctgttgcgggcgtgattggctggcaggcgccctttttccgggacggagccgcgggaaaagtttactgtgccatgaaagaaaacgcgttgcgcacaggtaaataaaaaatcatgttgttcggcgccagaaaaggaacggggacggtaaaaaatctttttggtttcttctgtttgatattatgtattccgggttccatcgtttccggagcggaatccctgcggcttgacctgggccgttatgcgggacgcacggagaaggaaggctggcaccaggttgccttgaaaaatcacagcggagccgggcaggaaaagattctcttgtatctggacagttccgcctccggagaagccctggaaaccgctgtgtttgccgcttcttccctgggagctgctccgggagcggctcccctttccctgacggtgacaggaaagggaggcctgtgcggcacgcccggactggcccagaaaaaatatggtcggataaaagaagacgttcccggcatggcgctgggcggtacggcggtgggggaatggcctgcttccgccgcgggggatggaatatttctgaaagacggctccctgacctggactttttccaacctgaaaccgggctcctacaggctggaggtttttgcggggcgcgctgctgaaggagccgcccgcatggcgattgccgtggatggagctccggggctgtccgtcagtggaagctgcgctgccggaacggaagaaaatgaacgcgggctttatttcaacagggtggtcacggtatcccctgattcccgttccctggctttcacggtgaaggcggaaggcggcttcggctccttgaacggcgtggtgctgaccccggcgacggaagcgggggagagaacgctcccttctctggacatcccgggaacggaaaaggcccccgttcttctggaggtgtcctccgccgggaaaaattcttcccgccacggagggaggggaatatgaactcctgctcaatttgcccccctatgaaagcgttacttggtttgcggcggaggcgggacgctggccgtccggatgcaacagggtgctgccctggagcgctgcttcactggagcatgcgttgaatttgcggaatccggccgctggcggcagtccggattcccacggcatgctggccctgttccggctgaaaaacggcaactaccttgttctgctgcccttatgcggcagcggttccgtctcctggcttgaggcggaaggaaatactctgcgggttaaaagcggaaccctggggaccgcggccatggcggacgcgaaggaacccatgctctgttccggggtttcccgcaatttgtatgaagccatgcgcgcgacgtgggaaaaagccgtctcccatccgcggctgaagaggcattccggctggagatgcaccaaggacgcccgttatccggaacctttccgctacctgggatggtgcagttgggaacaataccgccgccgcatcaatgcggacttgctgctgcgtgccgcccggtccattgacgaatcctcccttccggtacgctggctgctggtggacgcgggattccagactaccagcggccagttccaattgcgctccttccttccggacgggaaaaaatttccgcaggggtgggcccctcttctgaaacggcgtgattcttcccgttccggcaaaatccggtggatgggcctctggcactgcttctatggggacaagggaggaattgacgtgaaaaacgatttggggatggattccagcttcatccggaaaggcgatacgtatttgccgggaaaaagcatgaaaaccactcaggacttctaccgggacttcatgaactccgtccgtgggcgggacggaaaaggctttgacttcgtcaaggtggactaccagacggaatacctcaagaaggtgaagggcgccggaaatcctgccaggcagtcggtctggtgttcccggtcgctgaaccgtgcggtggactcttccggcctgctgggcatgatcaattgcatggcgcaggggacgctgcatatattcaataccgggaccagtcccgtcacccggtgcagcatagactactccctgaataacctggatgcgtcccgcagccatcttttccagtcttataccaatacgctcctgctcgggcagacggtgtggccggaccatgacatgttccattcctccgatcctgtctgcggggacgtgatggccttgtccaaggccctctccgggggacccgtctatttgtccgacaagccggaggacttccaaccgcgcagaatctggcccctgatcaacagggacgggaaaatcctgcggcctctggctccggccgtggccttgccggaatcctgcttcatccatcccctggagagcggcagcctgtacggcgcgattgccccgctcaacaacaaatgcgcggccgtggtgtactacaatctgaacacggagtccaccaccctctccagcagactggtgccttccgtgtatgaatgggctccctccatgatgcagggcacgggagcggctccttcctggaacattcctgcggaggggctggccgcctatgattggagaaaccggaagggcgtcaaactgccgaatggaggcattcccctgagcctgcccagcctccggaacggcgtcatgcaagacatcttctaccttctggcccccatagaaaaggggtgggcggtcctgggcaatccggacaaatacctttcccccgcctgcgtggaggagggaatcgtccgtacggacgggaaaatgacctttatcttgaaggattcggccagcgtcctggtttaccggaagggcggccatcccgtcgtggaaggagccgccgtccgcaaattgcccggaagcacggatttttacctggttgaattccccagggaactgcctgtccgccgggtaaccgtcctgaaaggagaaccgtgaaatgcggttgaaacggcattcccggcggaacgcgtggcggaaggaatagcccgcgcttctattctccgtattccgcccaggaactgctggtctcccacacgcgcacgcgttccagggtgacgcaatcccgcacggggtattcgccggaaccttccctggccttttccagcgcatgccgggcgaagttgaaaatggtgcgggccattacctcgctggtggggtcctcccggtcaaacgggatgatgcgctctccgtacgcggccacgaaggcggcgtaattggggtcatccgtattcacgcacagtgaatggtcaaactgctgtagaaaatcccccatcatctgcttgacggccttgaaatccaccaccatgtcgttggcgtccagcgtatccgcccggaacaccatctccacggaacgcgtatggccatgggggaatttgcagttgccggggtgcttggacagaaggtgcccgctttccagttcaatggatttgcagattcggtaggccatgaaggcaggatagcgtgggaaggggcggggggcaatcccaatcagagtctgcctgcggtccggttctctgtgtgcggaacggggttcgtaacggattctgccggccgtgggcggcttttccttgcgggcggctgtgatttctggcagccttcggaaaaccagcctcttgccctatggcctacctctcatggtccttcctgaaaatgggagaaaaatcggatcgcaggacaagcctccttttcctgctcatggcgggcattcccatcatttttaccgccttcttcgtcttcatgctgggggcggccacggtttggtacgcctggcctgttctgctgccgatgcttctcctcctctatctcccctgcgccctgcggaaggaaaaggtgcagagcgtccattcccggaacatcctctttggccgggacccgctgacagtcgtcttcaggccggtggtgaggaactgggcatatgccgtttatgccgtgcttccggcgttgcccctcctgttttccggttggaaaatgcccctggacagtctcaggaacggaaggaatctggcggaattcttcctgatgtggatatccctgtatgccgtcttcacggtgctgacggttttcctgggaaaggcacggtatttgaagccgggcaggctgttgctggccgctggcgccaatctggcgctgatgctgctttattccctgcttgcgtgaagcgggcgcactgtgtatccggcgtgttctccggccttcccgtggacgggggcttttccgtggcgcctgctgcaatgggggaaccgcgttgctctgccagcctggcggccatctccggagttgttggaaagaacgggctctattgccgttctttccctgaaacgcccgccccgggcatgggagagtggcgcggaaagacaggaatactctccaggacggggaaatttgctgaaattgaaaatcttgaaataatattgtttttctgtaaaatctccgcgccgggttgatcccggattaagaaaaggaggtgtaccatgtgaatgactgtatcatactaaccaggctgattgagttactcattgtaatgttcagttaacgaaaggccccgtcctgtagcagcaggacggggcgatttattagaggtaaatgtgatttgtatgatactaaccggaaccactatgaaaaatttccataaatagtcaagcgggaaaaacttccggcaatgtcttacaaacggttttttaaaggctggagattctccctgtaacgggtagcggattccacctgtttatatctgcgcttcttcctccttccggatttaatgaatgcttgaaacggcaggccggggatgttcgggagaatatccccaaaagctcaagggaaaaaggaggggagataaaacgagttttcccgtaaagggaccgtaaaaaatccctgttccgcgcggcatggcggaacagggagtaaaaatcaggagctctgtccgggcggcttaatgggcgcagccggcgcaggcccagccttcgcggatcttcgcgaagaaatcgttgcccttgtcgtccaccagaatgaaggcggggaagtcctccacctcaatcttccagatggcttccatgcccagttccgggtattccagcagttccaccttcctgatgttattcttggccaggatggcggcgggaccgccgatggaacccaggtaaaagccgccgtgcttctggcaggcgtccgtcacctgctggctgcggttgcccttggcgatcatgatcatggagccgccgttttcctggaacaggtccacgtaggaatccatgcgccccgcggtggtggggccgaaggagccggagggatacccttccggggtcttggccggacccgcgtagtacacgggatggtccttcatgtactggggcatgccttcacccttttccaggcgttccttcagcttggcgtgggcgatgtcgcgcgccacgatgatggtgccgttcaggctcaggcgcgtggtgacggggtacttgctcagttccgccagcacttccttcatcgggcggttcaggtcaatggagacggcctcgctggaggtcatgcgcagggcttccggaatgtactggccggggttggtttccagctgttcaatgaaaatgccttccggcgtgatcttggccttcgcgttgcggtccgcggagcaggagacgcccaggcccaccgggcaggaggctccgtggcggggcaggcggatgacgcgcacgtccagcgcgtaccacttgccgccgaactgggcgcccaggcccagcttgcaggcttcctcatgcagttccttttccagctccaggtcgcggaaggcgcgtccgtactcgttgcccgtggtcggaaggttgtcgtaatacttggtggaagccatcttcaccgttttcaggcacttttccgcggaggtcccgccgatgacgaaggcgatgtggtagggcgggcaggccgccgtgcccagcgtgctcatcttctccaccaggaacttcttcagcgtggccggattcagcagggccttcgtttcctggtaaaggtaggtcttgttggcggagccgccgcccttggcgacgaagaggaaggagtacttcatgccttccacggcttcaatgtcaatctgggcgggcaggttggtcccggtgttcttttccgtgtacatgtccagcgccaccgtctgggaatagcgcaggttgttctgggtgtaagcgtcgtaaacgccgtgggaaagctgttcgcagtcatcgcagccggtccagacctgctgtcccttcttgcccacgatggtggcggtgcccgtgtcctggcagaagggcaggattccggcggaggccacctccgcgttgcggagcatcgtcagggccacgcttttgtcattggcgctggcttccggatcgtccagaatggcggccacctgcttcaggtgggcggggcgcaggaaaaaggccacgtcatggaaggcttccgcggccagcaggcgcaggccctccggttccaccttcagcatggggtgtccttcaaagtcacccacgctcacgtagtcggacgtgatgaggcggtactgggtgtcgtccttttccatgggaaaaggatcctggtaatgaaaatccggtgttgccataacgggaggcaatatagcggagcgccgcccccggttcgagcaaaaaaatcaggggcggtccaggccggaatcaatcattaaaaaaggcttctgttcgcccagcgtacggaaaggaacgcagtttttaaagaaccacggactgacgggaaacagcatatccctgaagacgtgatacaggaattcccggtgcatgcgccgttcctcttccggagtgaggatgtaaatgacggaaatgggctgaatgaatgtgatcacggggattccccacatctgcagcaagctgtctctgatcttgaacatctggtgaaccttcccctgaaagacaatcgccacggccacggttcccgcagggcttgcgtccatgaaggcatgcattttttcccatgcacggggcagcagttggcaggtaatcgtgccgtcctgctcccgtgccgcgtaccggatatcctccgggccgatcagggattccggccggataaaggcccaggatggaacaggctccgggaaatcagggcgggtgtaggggatggagcggaacccgcttttcagatgaatggttttcccttgccggagttccgggaggaaccgctgttccagctccgtgctgcggggatgcacgggataaacggccagcttctttttcaccttcctctgctgttgttccgtgagcggcggaaactgggtattgatggccgcgcagagggcatccagctggcggtcatctcccggcacgggaatgagggtggcgtgggaaggcattttatggaatacgggcgtagacaggatggcgccgcgcaggaccacggccattctgtccttgccgggccggagggcggcgcaggcctgttccaggttcctgtacgcttcttcattccaaacgatgtccagatgccccggataatccggattggggcgtgcggactgggcgtaatccccggtgacgatgggggcgttccccagaaacaggtattccttctccgcgtctttttcttcctccgcgcccgggcggctccagagccggtagcccggtacggaaagcgtcccttcttccaccagccgggcgttctccggatggatggcgtacagggccagatcccgcggaatgaaaggggtggtttttcccgtggcggcccggcggttgagcagttccgccaagttggcggcttcattctccccgtccagtccggaaatttcaaaagcacgggaaataatggcctgaaccaccgggaccgaattgacttttccctgaacgacgacagccagcctgtcatgtcccagcctcatggcggatgtagccgttttcatggccctccctcccggcgtgttcagggtgatattgagatgctccggtctgctcggatcgacgcctgcccgttccacctccgcctccgtaatgaccggttcgtctttcaggaacagacgttcccgctgcatctttccgtggcggtcgcggaattcatacacataaggcgtgtatccttccgggaccggttttccttcccggtccagctccaggctgtccggatgcaccatcctgacggcaatggagggaacggccggcggagccgcctccgcacgggcggaaagcgggagccagaaggcggaaatgaacagcaggcagagtagttgtctcatggtcaatatgatagaacccctctaacacgtcaggcaagaaaaaagagcggacgggagcggcgcaagcccctgcggtaattaatatccccatcgtgccctgcagacacgcgtattttaaatcgtttgcggaaacccatcccgggttcagttgccgcaagtgtttgagccgttcccggggccttgacaggaaaatcccccggaaccgcaggaagccgggggatttcagccgaaggggggctcagcgggagggcggtgtccctgcacggggggcgcctgccatatccgccatggtttattgccgcggcttgcggcggggagaagcaggttcggagaatgaggaactggaagaggaggaaggcctgggagcgccgtactcctccggaatttccgctgccagagggatgtcgttcgggaggctgctttcgtcgtcgtaataattcttcatcctcttctgggcgtccttgatcagggtggcttccgcccattcctccaccgtcatgttgtctcttctggcggcttcttcgatgagtttgtaatcctcggcgctcagcatgacggcgaagggtttccaatgggctcttgccgcctccttcagttttttctccctttccgtcttttccatcatgagccggatgagagcttccttgtctttgggaatggctaccttggcaagccagttgcggaccgtgttgggagacacgaagcattcctccgcaaaatcattgcgggagatgttctgctgtttcagccaagccttgatctgcactttgagttcatcctgattctcactcatgcatatctttgtaacgaaaatggtgcgatttttcaaccttttttgcataatatcattttaacggtatattttcgttgactgaaataccgtttcaggtgcattattgcatcgtaagcgggttattgaagcccttattgcaccaaaagaaggatttttatgaagacgggaaataagaaaaagagtcagaaaaaaattcaaatcaagggaaaaatgccgttatccgtccattttttccgggatgcggaagcggacgccctgaacgtggagcgctgccagcttgataaggctaccctcattgcctgtgccgtcaaacgtctccgggaagatctgggcaacgtcccggattccggtaaaaaaccttccgcatgactcaggagatttactgggaacttctggcgtggctgttccgctcttttctggcggtgactaccttcgcctttgtcgtggccgggtaccaggccctgcgctgccgtccgcgggacggcagcaagcggagaaagtagggaatggcaaaaaggtccgcggttccccggcgtcaggccggggaggacgccggggaggttgactcacggcttcgtctcccttatcttccgggaatgtcccgccgtgtttcggatgaagccgccctgtccgccatgagccttgaagaactctggcgcttgtttcccgtcatcctgagcgaatccaggccggagtgggcggaaatctaccggagggagaaagagatgctggaatcggtggtgcccctctcgcgcatcagccgcctttcccacttcgggagcacgtccgttccgggcctggcggccaaacccaccattgacattctgctggaagtgcggcccgattcatttgtttttgaagcgcttcccctgctggaaaagtgcggctaccgggaaatgcaccgggacgaagcgcagatgcgcctggttctggtgaagggctatgccgcggacggcttccgggggcaggcgttccatctgcatgtgcggccctgccgggattgggatgaattgtacttccgggattacctggccgcgcatccggatgaggcggaaaggtacgccgccctcaagcgttccctgaaagagaagttcgaattcaaccgggatgcctatacggagggaaaaacggagctgatcgccgccatgacccgccgggcgagggaagaaatgcccggcaggcacgtcccggaataaggccgttaaaccgggttgctttttatagggcaggggatgcgcggaaagacggaaggaaagggcaggcggacattccaaacttgcttgatggtgaaacttccattgtcgtccacaagggcatggatttggcacgacctttccggagggacatctgctttgaaccaccctttccatgtttgggaaactgcccaaagagcggaagtctaatttttatccttccgggcaatactcgcccgccgcggcattaaaaagcctgcttccggctgttcgcgccatggatacgtttattttggcggcgggaagaggattaagccggttggaaaggaaggcctttccgggggtgaaagaaattccgccgcttcccgcagcgtggatgaggctgaatgacaggcatgtttttaaggtccgctccggatggaaatccgtattgccagaagtggggaatggcggtaacattccgccgctatgagtattgagagtttcgcaaaccagcatgtgctggaattggtggcttaccagccgggcaagcccattgaggagacggcccgtgaactgggcctggatccccatgatattgtgaaactggcgtccaatgagaacccactggggccgtcccccaaggcggtggaggccattgcccgcgcggcggcaggcgtgaacatttatccggacggcgcggccttccgcctgcgctccgccattgcggagttctgcggcgtggagtttggccagacggtggtgggcacgggcagcagcgaggtgattgagctgatgtgccatgccctgctgaatccccgggcggaggtagtggccgccaggcacgccttttccatgtaccccatcatgtccaagctgttcggcgccacgtacgtggaagtgcccaacaagccggactggacgcacgatctgaacggcttcctggatgccattacggacaacacgcgcatcgtgttcattacgaatcccaccaatcccgtgggcaccgtcgtgacccagcaggagattgacgatttcatggcgaaggtgccggaacacgtgctggtatgctttgacgaggcgtaccgggagttttccgacaatccgccggataccctcaagttcgtgcgggaaggccgcaacgtgattgttctccgcaccttctccaaggcttacggtctggcgggcctgcgcgtgggctacggcattgccccggaacacgtgtgcagcatgctgcacaaggcgcgcgcgccgttcaacctgcacgtgctggcgcaggaggcggccctggccgccctggaagaccgggagcacgtgcgccgcaccgtggagaacaatgccgagggcatgcgtttttacgaacaggctttccgggacatggggctggaatggattcccagccagggcaatttcatcctggtgaaggtggggcagggcaggaaggtgttccaggacatgctggccaggggcgtgatcgtccgcgcgcaggacggctacgggctgccggagtggatccgcatcagcataggcacccccgcggaaaatgcccgctgcattgaagttttgaaggaagtactttaaacagtttcgccgtttttcctgtctcaccttttatgatctctccggaacagtacattgacggtcttgaatggcgttacgcctgcaagaagtttgaccccgaagcccgcattgagaaacccacctggcatgcgctggcggaaagcctgcgcctcagcccgtcttccctgggtcttcagctctggaagtttgtggtggtgacgaacaaggaattaaaggcgcgcctgcgggaagtctcctggaaccagtcccaggtggaggactgctcccattacgtggtgctttgcgcccgcaggacggccacccagcgggacgtggaccgctacctggcccagattgagttcacgcgccacccgtccgcggaaaagctggcttcctccgctgatttctatactggctatgtaaaatccctgactccggaaaaaatgcacacctggctggattgccaggtgtgcattgccgcaggcttcctgctcagcgcggccgccgccctgcgggtggattcctgcaccatcggcggcatggaccgcgataagtatgatgagattctgggcctggacggcacgccgtaccgctccgtggtgagcgtggcgctgggctaccgcgcgaaggacgacgattacgcccgcgaggccaaggtgcgcttccccgccggggaggtgatcgacatccgcgcctgatttctccttcccttttccccctgtccggggccggatttcctgattggaggtccggcccctttttttgtccggcagggcgtttaccttccgggcgcatggtctttttcccgcgtccggagcgtgcctgttttttaatctcgccaagaacgggatgtttgagataataacttgcctgaacaagattggccggtcctcccgggcccggcggttttccttcatgaaacctgacgcgcggcaatccgcccggcggaatgcctgcccggacggcggaacgaaggagaattcacccgctttttcccctttccctgcaagaaaaggacggcgggcgcgtagttcttggcacgaaccagatcctccttttccctgaaacgacacgataacatgaagaagaacctattcctgatgatcgccgcttttgccgcatctcccttgatggggcaggacgccaagcagattgcggattccctcaccatccctccggtgaaagcgggcgcaaaacaactgccgatgccaagcgcctccggagcccagatcaaattcctgggggccgactatgagcagcttgttaacagcaagggaaagatagcccccgttatttcagacacccccgtcaacgtcagcttcaaggtgaccaaggacggcaaggaagccatcagcaaggattatgaaatcatgctgcaggccccggacgccgcccagggcaatcccaagccgcgtatcattccggagatcctgcaatggaagggcggccagggcgagtacaagctggggaacacggtttccgtagcctgcccggaaaaagagctggcgcagatattcacggctgatctggaagacgtggcggggaagaaggtcaagcttgtcccgcccggcgcgaaggcggatatttccttttccctgctgaaaggcggcaacctgggcaaggaggggtacaggctccaggtgaccagggacggcgtccgcattggcgcggctacgcccaccgggctgttctggggcacgcgcacgctgctgcagatgctgcgccagacccccggcagcgttccctgcggcacggcagtggatttcccgcgctatgagctgcgcggcttcatgcttgatattgcgcgtacgccctatcccctcagctacctcagggacgtgatccgcaccatggcctggtacaagatgaatgatctgcacctggtcatcaacaataacttcattttccatgaaatgtatgtggacaagggccgcgatccgttcaaggagctctatgccgccttccgcctggaatccaacatgaagggcaaggacggcgttcctcttacggcgaaggaccttttctacaccaagaaggagtttgcggatctggtggattacgccgaacgccgcggcatcagcatcgttccggagattgacactcccggtcacgcgctttccttcacccgcctgcgcccggacctcatttacaagggacccatgaaccatgaaaagcgccgcagcgagatgctggacgccgccaacccggagacgatcagcctggtgggcaaggtatttgacgagtatttgctgaaagaccccaaactgggccgcccggtgttcggcagcaaggtggtgcatgtgggcgcggacgagttttacggcaacaaggaggattaccgccattttgcggacgccgtgctgaagcacgccctgaagcgcggttatacgccccgcatctggggcagcctgagcaccaagcccggcaaaacccccgtggtgagcaagggcgttcaaatgaacctctggagtaccggatggatgagggcctgggaggccgtgaaccagggctatgacgtcatcaataccaatgacggcgccctgtacgtggtgccctacgccaactattaccgcatggacaggaaccacaaggggctttataataactggattcccaaccgcatcgggaatgaaaccctgccttccggccatccccagctcatcggcgcggcttttgccgtctggaatgatgagacggacctcaagcactccggctatgccccctatgacatttggggcgttatttccggctccatggacgtgctggcccagaagatgtgggggaaggccaaggctccggattcttttgaagagcaccgggagctggtcaaggccatcggggaagccccccgtaccaaccccctccacaagtggaaggattccaagcccttctccgtggttccgggcaagctgccccagcagttgaaccagcccgccctggggcccggctaccgcctcaccatggagcttgagctttccgccgctccggaagggaaggagcaggttctgctttccggcccggaagggaagctgttcgccgtcatgaaggacggcaccatgggcttccggcgggatgactctctggaattctccttcggcgccaagctgcccgtcggcaagaaggtgaaggtggaaattgtgggagagccggaaaaaaccaccctcctcattgacggcaagcctgcgggcaccatggtgctcaagagcttccgcaatccggacgaaaactttgaaccccgcacgaagggcgtgcgctccaccttcgttctcccgctgaaggtgctcggctcctccttccaggggaaggtgtttgatctgaacgtccagccgttgtaacggcccgtgccggaagcggcgcggcccggataatcccgggcggcttcttccggagccgggcggcctcatgcgccgcactctttccagcgccccgcagtctccggacttgcggggcgttcctgttcccggcgccgttctggagcgccggagatggggaagttccgcgcagcggttcagtcccgcatgcccctgtacctcatggggcggtagccgctgttctccagcatggggcggctgaaaacgcgctccgcgcacttccagaccggcagggggccggcttcactgcccaggaacctgtctttttccgctccctcccagcggatgaacaggagcacatggcgtcccggagcaatcaggatgtcccccgttttcagctcatcccaggaggggagggaaatggaaagagcggggagctcccgtgtggaaaatggcctggacaggcgccagcagcgggagacgaagccggagcagtccaccccggcggcaaagcggctggcggcggcatcccccgcggcctgcttttccggggtgcccatgtccccggccgcggcgggggcgcccccgttggcggcatccgccttcaggcgttcggcgaactgccgcggggtgtcgaacccgccccatttgtacggcatgccggtggaacgcgcgccgggccgccaccacgcgccggcatggcctccggctgcggaggcgtccggcgtgtctatccggatgccgtcctcgtccgtcccgtggcggacgttccggggagagccccgccaggccatggaagtataggcccggctggtttccagggcttcacggcgggtgacggaagaagcgggaggcaggatttccggcgcaccgggaacacaggcccccaggcaggcggagagggtgagcagcgtcagggtgttggtcatggactgcatgtgtagccacttcccgccgcggaggcaaggatgattgcaggagaacgctttttattcggaaaacgaacggtctggaagcttgactaccgggtggaatatgtgaaaaaggggttaactgaggcggaaaggaatggaagaggtttccgttcgccctcccgcttcccatcgccttgcattttttatggacgaagaacaacaaatcatccaggagccggttcaggaacccgcccctgaaaaacagcccgacaagacccaggccactcttacggcggtttctccgctggtgtccgtctttttcggtttctccaccggcgtgaacatcattccgcccctgatctgctggctggtctggaaggatgccaaccccctggtggacaaggtaggaaagaacgttctgaatgcccagatttcctgggcgatttattcgattgcggccttcctgttatgttttgtcctgatcggcttcgtgctggctcccgcggtcgtcatcgcgtggattgttttcgccattatcactgccgtcaaggtggcgaacggggattacgattacgtggcgcccctcacgattacgttcctgaagtaacgttttttccacttgcccatttatgaaaaagccgccggcattctgcgccggcggcttttttgcggaatgggatccgttttccggagaggttcagatgggcatgtccttttcactgccgccgtacatgaacgtatggagcaggcgcgtgacctggttctgttccgcgcgcagctgggcggaggggcgcagcgcggcgtacgtcaggctgtcatgcccggtgaattccctcatgtggaagccctggaagctggtcatgggtttgctgtcatggaagagcttgcccctccggagcagttcgtcaaagacgtgttccgcctcccgcgtgcgcgtcagcgcgttttccggatggggcacgcggatgaccagcgcgccgccgtccccgcggaagttgatgcccgctccggccatgacgtccgcggaaggctggctggtaacgctgcccagaagcagcacgccgtcatctatcaaatggatgcggctggcgtgggcttcctccttcacgtgcagcacgccgccgtaaatgtgggtggatacgctgccggaaagttttttgatgcgcatcaggccgtgcttgatgacgagttccgagccctcgccgggcaggtccacttccgaggcgaagagccagccgtccgtcatggcgattctgccttcatgctctctggagccctgaatgcggccctggcccatcagaaggcggccgccgttgatctccaggctgccgttggccttgtttcccaggaaaacggtcatgtggtccggcaggttgcccaggagcgtcatggtgcctccgttacggatgaccaggtgggcggtgcggtgcccgtggtccggctggttggggcctcccacgtaaacgggggcgttgatgatgtaaagattgccgccggaatcaacggtgagggaatcctggatgtccgtctggccctgcaccacgtcattgctgatggtgaccgggcacatgtaggagacgcggttcatggatgaggctgaaagcggcatcatccctgttagaatgaatgggttgatattgctcatgacgctggttacatagttggtttgacgtttgaggcgcggtggatgcgcgccaatggtattagaccgtccgggcggataaaatgttcgggtaaattcaccttattttcttccggacgggaaaagcgcggttcactcccattccacccgggtcagttccagttcccgtccccggaggatggccagggcggggtctccgcagccggggcagatgtagccgtgctccgtgaaggaaaaatccgcgctgcaagcgtcgcagcggcacagggcctccacccacgtgacgtccagggcggcgtcctgcgcggcatacgcgtccttcagggccaggaaggcggattgcagggcttccggcaccacgccgctcaggctgccgatggtcatgtgcacgcgcatcagccgggttcccccgttcttttccatgagccgccgggccatgcccagcgccccctccatgatgcctacttcatgcatgcgcgtctttccgggcctggtattcctccagggcgcgggcgatgagggtttccacgaggtccagcgcctgcggcacggcctcccgcacttccgcggacatgggctggcagaagtccgtatgcccggcctccacccccaccagcgtaatgatgcgcggcagggttccgcacagctgggccgcgcccagcacttccttcatgccgatctggtgcggtgagatgacgcgggagaaatggcgggggagttcgtcccggttgcgcgtgacgacggttccgggccgggcccccgtcttgacggcgtccagcaggatgaccgtatccgcgtcttccagcaggggcagcagggtcattcccagcgtgcccccctcctccacatggaccagcgggccgtagtcccgttcctgaaggcggtgggcaagctccacgcctatgccgtcatcccccatgagcgggttgcccacgcccagcacgagcacgggataggcgttccccttcacggggcagccccggagttcttccgtgtatggctccaattccatggcagatgcgggggaagggttattcatcccggaatttgacgcccttgcgcagccagcgccctccgctgaacatggaggagatggtgccgtcccggtccacgtttccggagaggatggaaaggtacacgtgaaccatggcgaagatgatgaagcaccacatgccgatcaggtgcaccaggcgcacgtacggaacccctatcaggtcgttcaggggcatgaaccagtggtagaaccagtggcgcggctcatacagggcgtacagggccagcccggtcaccaccatggtggtgaacaggacgtagacgcccgtgtacgtccactgctgtaaaggattgtggccgatgtagcgggggccgtcataactgcgggcgaacacgtagtccaccgccgtggtgaagaggtccttccactgctgcctggagatggggaagagggcccggaagctctggtacttgttggaggccatgaagaagcaggagaagcgcagcatcatcaccaccaccagggtccaccccagcgcgtagtgcacgaagcggagcgtgccgaactggaaggccccgtgcaggtcccccattttcaggaaccacccttccgcaatgcagatgccggtggaagccagcccgatgatgcagaacacccaggtccagtgcagcacgcgcagcggccagtcccagacgtggaagtagcggaaattggccttggccatggaaaggcggcgcacgtctctcatggcgtgcatgggcaccacgcccagcaggcgccacggcgcgccgggccggtggacggccacggccacgggttcaaagccggagggggagtattcctcaaaagccttgttcatgcgctctttttccagatggctgacttcacacagcttttccagggccttcaggctgccgcgggccaccatgaagggggcggcgtcctccttgtccgcggctttcagcatggccgtgctgtacggcctttcccgggagggagcctcccaggaattctcctgctgggcgtagggcagggccacgccccgttcccgcgcggcgtggagcagggccaggtcccccgggtccgtgctgccgttgggggaggcgcacacggccagggccaggatttcctccggcgtgtaaaccgggctggccggaatggcgtcctccaccgccagggtgaggtctttgtcgataagagtcgttttcacgggtcctgtctggtcagaatggcctccccttcctcgtcaaacaagtggacggcgcaggattggcacgggtcatagctgtgaacggtgcgcaggggttccaccgggcgggtggggtccaccagcgggtgttttccggtatgggccagggaatattcgtacggccccatctgcccctccgcgtcgcggccggagctgttccaggtgctgggcaccacggcctggtaattcaccgtctggccgttttcaatccgtacccagtggctcaggctgccgcggggcgcttccacccagcccacgcccttgcaggaggagggccaggtttccggctcccatttttccgggttgaaggtggcggtttccccgttcttgatgcggtccgtcatctcctggagctggttcaccatcatgtccacgttgatcagggcgtccagggagcggccgtacacgcggcccagcgtggagttcaggaaggcgttgtcgcgcggcagccccagcttgtcgcaggcggcgtccacccgctccacgatggcgggcacgccctgggcgtagccgatcatcatgcgggcgttcgggcccacggccatcgcgtggccgtcgtagcgcggggctttcacccaggtgtactgcggatggtcggagagccacttgtagggcggcctggggccgttgtaatccgcgttcgtctccccgtcgtacggggccaggcccgcgtcccggccttccgtgtacttgtaccaggcgctggtgacgaattccttgatcttgtcctggtcaaagggaagcacgtttttatagtccccgttcagcaggacgccgggcttgatcatccccttgccggcgggagctccggtgttgatctcggacgggtccccggtgcagaaaaagttggggttggacgcgccgatgtgggcgtaatccttgtaaaatccggcgatggccacgatgtccgggtagtacaccttgtggatgaagtcgtggcaggtctgcaccagctgtttcaggtagctcagggcaaactggttgatggcctggtcattgttcatgttgatggcgcaggccatgccgcccaccaggaagttcgggtgcgggttcttgccgcccaggatggtgtggatcttgatcatgtcccgctgccagaccagggcctggagatagtgcgccacgcccagcaggttcacctccggcggcagcttgtaggccgggtggccccagtagccgttcgtgaaaatggagtactggccgtgggcgatggagtccttcagctttttctgcaccccggcaaagtacgtggcggaggacaggggccagtctgaaagggatttggcgatggcggcggtttccttggggtccgccttcagggcggacatcacgtccacccagtccatggcctggagctggtagaagtggatgacgtggtcctggatgcccagggcgccgctgaccaggtcgcgcatgaggcgggcctggacgggcaccgggtattgcagggcgtcctccaccgcggccagggccgcaatggcgtgcgtgcccgtgcagacgccgcagatgcgttccacgaaggcccatacgtcccgcgggtcccgcttgcaggcgatcacctcaatgccgcggtactgcgtggtggaggtccaggcgttcttgatgacgccgtctccggcctccatctccacgcgcaggtggccttcaatgcgcgtcaccgggtcaatgaccacccggctggattccggaacgtccgctgatgtgtaattgctcatggtaatctggtggtgaaagcttctggttattcttcagtttccttgtcgggcgagccgggagcgtccccgaaggcgggcagggagacgttcgcctcctccttcatgtgctgcttcttgtaatggatggcggaacctacggcatgggcggcgatcgccgcgcccgcgccggccacgcccacggccccgatcacgttggcggaggcctccacgccgaagccgttcacgttcggcagcgtcttgtagaagggggtcatgcggtcaaagaagtacagctccgtgcagccgatgcacgggtggccggactggatggggaagctgacgccgccgttccacttcacgatggggcagggggaaaacgtatccggtcccttgcagcccaccttgtacaggcagaagcattcccgcgcgttctcatcgtcaaacacgttgacgaactggccggcgtcaaagtgggcgcggcgcgggcagttgttatggatgcgggtgccgtacgccatcagcgggcgcgtctccaggtcgcattccggggcgcggtcaaaggtcaggatgtacatgatgacggcggtgatcacgtccccgatgggcgggcagcccggcacattgatgaccgtgcggtccgtcaggatgtcccggatgcccacggccccggtggggttggggcgggcggcctggatggagccgaagtacgcgcaggagcccaccgccaggatgtaggaggcgttttccgcgcagtggcgcagcatgtgctccaccgtatccccggccacagtgcagtacaccccgccgtcgttgaccgggacggaaccgttgatgacgaggatatggggttccttgatggcctcttccagggcggcgttggctgcgtccccggagggggccatcagcagctccacgtaaggcatggagacggcggaaagcaccatgtccccgatctcctcgttatagctgcggatggtgctttccaggcacccggtgcattcctggagctggagccagatgaccaccgggcgtttcagggcggccatcttgtccgcaatctcctgggcgttggaaacgcctccggttacggtggccacacccatcagggcgatcattttcaggcaccatttattgaattcgcgccggctgacgccgcggcgctccatgtgttcccccagggtttccccgggacgccatgtggttaaaatctcatgattcagggaggcctgctccgcctcctgcatggaaggttgctgcgtgcgcttcatgtgcgtggtccaaataaatcgtttccatttagacacgatttccgggaaatgcgatcaatattttccaatttttcaggggatgcccctaccaggaccagacgttctggatttggaaaaccacggccgtctggcccctgcggccgttgacgggattcttgacgagctgaatgtcaggctggagcgtcatggtgggcgtcacctgggccacataggtcagttcaatgccgtattcattcttgttcacgtacgggccgttctttttggcgccctgctgccagaggaagcccaggcccaggtagccgtcattggaggcgccttttccgcggaagggggagaggagcaccagccccgtggtggccgcgcagcgcacgccggtcagcgtggcggcgtcatcgctggcccagccgccgcggaagaaccagcccaggtggctgctgcggccaagctgctgctggaagttcacggccacgccgccgccgttttcactgttgctggtggtgaagaagggctggaggcggtacacgccggaacccatgccgcagaagtcctccgccacgtagccgaattcaagcacgttcgtccagttgtccgagttcaggttcctgaacgggttgtggttctgggtcatgttgttggcggcggtggctcccatcacgtaaaaggaggtggtgggctgccatgcgaaatggaagcccagggagttgtccgtcaggggcagcatggggttgttgccgaagacgctgttggtcaggttattgttgtgtgagttggcgtaggcgttgtggtccatgtaattggtggtgtccagctggcccgccatcagcaggagcttgccgcccgctcccacccatgccaggctcaggttgctgaggtgggggtccggcccctggaaggaactggtgggattctggagggagcccagcgtggtggcggggcccttgctcccttcattgaagtcaaagccgttgccgaagtcgaactcggaggccaggtacaggccgctccccgtggagttgttgcggaaaatggtaatattggtcagcagggagccgttataggaggggaaatccgtctttccgttcaggccgccgcccgtcagtcccgtgtagttgaagccgaactgggcggaataggtgatgccgtatctggacagggcggtcttgatcttctgcgccccggtggaaatcatgtcttcacggatccaggcgttcggttccgcgcaggtgttgccgaagacgtaggaactgtccagatacggcatcatcttgagaggcttggccgcaaaccattcaatgccgggggcggagggcctggcctcatgctggagaagaacgctgggcctggtgggaacaccgggcgtcctcttggtgatttgttcttccggacgcatgcccttcagcaggctggggcttatttccctgccttccagggttttcacgcgcaggccgcgttccgtgttcaggtagggaggcgtggtcgtcactacgggtgcgggctgctgggccaggacgggatcgcaggaggccacgacggcgacggcgcacaaggagggaagcatgacatgtttcatatagacaatcagacaagacagcagacggaagtgtcataactcaactgaaatgctgacacgaatacctgttttttcccgcctttcctcaaaaagggaagactgcccctcccgccgcctcattcaaccgggcatgagcaagcaggtgcggttctccgtttcctggcgtccgcgccgccgtattccaaacagcgtggagggggaggaaggaggaaaggcatgccccctgttccgtcccggattcccctggttggcagttggccgtggaaacgcttccatagaagaacgggaatgggaatatgagagaaggaagggagggctttgaaggtaaaaaggctggttataaccggggctcctgtacggatttcaatagagagtggagaggggagagtggagagtggagagtggagagtggagagtggagagtggagagtggagagtggagagtggagagtggagagtggagagtggagagtggagagtggagagtggagagtggagagtggagagtggagagtggagagtggagagtggagagtggagagtggagagtggagagtggagagtggagagtaggggcgcaaagaaaaaggcggagaaggcagaaaaaaagagggccgttccgcgctggggaagcggaacggcccttgaaggtaaagggaggcttgggaaagccggaatagggggttatttcacggcgatcgtctgttcgcggtcggggcccacgcccacggtcgtgacggggcagccgatgagctcgctcatgcgcttgacgaatttcctggcgttttccggaatctcttcccaggaacggcaggcggagatgtcctgcatccagccgggcaccgtttcatacacgggcttgcagcgttcccattcgtccaccgtggcgggcggataggccaggatttcaccgtccaggtcatagcctgtgcagattttgatttccgggcacttgtcatagccgtctaggttggtcatggccatttcgtcaaagccgttgaacatggcggagaagcggagcagcacgccgtccgcccagccgcagcggcggggacggcccgtagtggcgccgaattcgcggcccatgctgtgcaggtggttggagatttcttcatcttccgtgacgaaggggccggaacccacgcgggtggtataggccttgcacacgccgatgatgcggtcaatcttgtgcggcggaacgcccgtgccggtgcaggcgccggcggaagaggtgttggaggaggtgacgaacgggtaggtgccgaagtccacgtccaggtaagcgccctgggctccttcaaagaggatgctctttccggaggccacggcttcatgcatgaccgggatggtattggtgatgtgggggcgcagcacgtccgcggcggcagtcacttccgccaccattttttcttcatccatggcgggaaggcccatgcgttccatttccgcgttcgccatcttgatgcggcggcgcagcacttcgtcaaaaatcctgggatccctcatgtccgccatgcgcacgcctatgcggcgggccttgtccgcgtacgtggggccaatgccgcgcttggtggtgccgatggcttttttgccgagggcggattcctgggcggcgtccatttccttgtggaaggggaggaccacgtgggcgcggtcggagatgagaaggttgtccttcgtgatggagacgccctggccgcggagttcattgatttcctccaccaggccgatggggtccagcaccacaccattaccgatgacgcaaagcttgcccggccacaggatgccggaggggacaaggtgaaggatgtacttcttcccgttggcgattacggtatggcccgcgttgttgccgccctggccgcgtgccaccacgtcggcggattccgtcaggaaatcgatcattttgcccttgccttcgtcgccccattgggagccgataataatggtattcatgataaaaatggaactcggagaccttaatgagattccctccttatggcaagacaatcttacaaagttgttaagttttcctgataagatgagtttgaagaagggaaacgttccggggagcggagcgggaaggatgagcgtggctgtgccggattctccgggttcaggacagggaatgaggcagggaaggcaatgccggaggaggaaaccgaaagaatatgcaatcgtaaaaggaaacggtggaaatgctgattcacggtggttttgcgcctccggcgtcctgggagccggaagattcccgcctctcgcaggtaaaagcttttccggagcgcagaggcggcttttctttcaaatacccgtcgctccgctccggcggaggctgcgatgagggacggaggccctcatttccaagggcggccggacgtgaaaagaacgatggaagtatttgctaaccgcatatttgcggtttccgcccaatacccagggcatccgtaaggggaaacttttccttcctgtaaaacctccccggcaggtagaaggtaagccgccgttggaaaagcactggagagtggccgcacagactttttaaagaggaggtcagcggaaatgcagggcggagcggtgcgcctccgcgggaaccagcgttttccagatgtcttcatccgcggcgatcatgcgctggatgtcccgcggcgtgtggcgcagcaggaattcattgaagaatgggacgtcaaccaccaggccgttcgccaggaagtgctggtacaggtgcacgtattgttccggggcgcggaaggtgcgcgccgtgacgaattccccggatttgcggttgagccagggagagacgtacaggcgcgtcttgttctggaaggtgcggccgaaggattccaggatgccgccggggatgtcctccgtccatttttccttgaacagttcgttcaacaggccgatggagagggcgatggcgatgggctcgttcgtgtagcgcgccagcagctcggacaggttgtcaaaacgggccatcttggtaatcagcacgttcttgcccagggctttcaggctgtccgcgcggtccaggaattccagatggtccacgtccccgccgcggagcaggttgttcatggatatttcacagatttccaggcaacggtccgcctgcgtttcattgatgtgcgagaggaagcattttttcacctgcgccatgacttccagatgcaggttgcagacggggttgaagctgcccctcatcagcacgatggggcgtttgtacagcacgtccgccgcctgggccacctggccgtttgccaggaacagggtggccggcgtcagaccggatttgacgagctggagcgcaaaaaggcggttgtccaccatggagaagccgtggccctcaaagcggacgacgtctatctccaccaggcggggatccagattgtccaccagggattcaatgaattcctccagccggtcccttttgaaaaagacggcgtgcaggatgttgacgcccaggatgcccaggtccttcatctggctgtcgtggtccgggtcattcaggcgcacgtggatgatcaggtcggacggttccgcctccggcttcaattggaagcgcacgcctatccagccgttccacgggccgttgtcccggtagcctttcaccttcaccgtattgcagaaggcgaagaagcgggtgtccttgccgcgcttgggccccaggcggttgacgagctgggtgaattcgtaatccagcatgcctttcaggcgttcttccgagacgtagcgcttgacggggccgtacagcgtgtcgctgacggtcatgtcataggcggagatggtcttggccaccgtgccggcggccccggaggcacggaagaaccagttggccgtttcctggccggcgcctatttccgcaaaggtgccgtaaatggtggtggccagattgagttggagggctttgtcctgtgtttgcgctaatgctttggaactcatggaaaacgggaaccggttctggattgtcagttggtgggaaggaggttgcgggtggcgtcgctcatccatccggaatacagcagcttgtcaataatgacggactggttgccgggcaggtccgccgggtagtgaatgagcacgcaggcgcgcacggggccgttgtaaaggagcttggtcagttccagcgccagcggggaatacctgtccacgtacgcgttcaggcgctccccgttggggaattccagggagaagttgatgtaggcggtattgcggtagctttccgcggaggattcctccaggaagggcggctggtagatgccgggcatgctgagggctattctgacggggacgggtttggagggttttttggcttccagctccgccgggagcatgggggagtaaccctcccaggcttcccagtccagcttccatttgccggagttccggtcatacaggaagacggccgggcggacggtgttgtcatccatcagcacggatatctggagcaggtccccgttcttggagcttttccccgcttcctgcggcaggtagtccttgtaccgcccgtaggaggcccagtgagccattttggggcgcacggcctcgggctccatcacgtagttgagcctttcttcgtctgattccgccatgcagtagagggccagttcattcatggctgccgtgatgtgggcggagacggattccacttcccggtcttcctccctgcggggatgggtcatgagccggtattgctgctccctctgctccagttccgccagcaggtccttgttcacgtccagggagaagaccgcttcatggtccacaaaccggtctgaaatattcagaatcttggagccttccgcttccatgtcctttccgcgcaggaacatgaacacgcccagcgaggccagcaccaggccggagacaaagagccagatgtgccaggtggggcggcgctcgctgcgggcggcttcctgggcggtgggctggtattccggctcttcatgcgccagggaggcgctgcgggcggctgtgatggcaggggcggcgtcccccttttccttccgcttgcggattttggtagtgggttccgcagggatggggatggaaggcctggtaacggcaatgctccgtttatccgtctttttctgaggcgtaagagatttgtgggaagatgcggacggggaagcggaggggctttcctcctgcgcgccgccgtgccggacggaggctgctggttcaggcgtcccttccgggatttcaggcgctttttccggagcttcaggcatccgttccggggccattgctggctcttcctcctgccgggtggctgtgacggtggaatggcagacggggcatttcaccttgttccctatgcaggagggattgacggcaaaggaattgttgcacacgttgcagcggcaggggacggcggcctgttcttccgtttcatccttgactttctcttcctgccgggcggtgaccggagcggcgcagatggggcattgcacctggcttcccagaaaagacgttttcacggcaaaggggttgccgcatgacgggcatgtgcaggctaccgtatcctgggagggggagggcatggaagaaaagggagttacaggtggatgaattccggaacggggatggtgatgggcttgggagcgggcagcgtgatgctcgtgtccgtatggtccggagaaacggggtctgcggaaagggcctgggcttccggcacgttttcacccgcgcccagcagttcatagttgcggttggcgggaccctggttcagctccgtgtggtaggggtcgtccccctggaggatggccttggtgggcaggatgggcggcaggggcaggatgcggttctgcgccgtgaagggtgagacgggggcggagatgtcctccccgtggaggtcgcagaagggaaggctggaatcccccttgcggaggtattcaaacatggtgtggcggcggtatttcttgtccaccgggtcaatgtcatagcaactgtgcgtggctctcttcccggtggtcaggcagatttccacccgttccacgctggggggcggggccagttccccggcggggaagaggcgttccgcctccgtgacggcggcgcccaggacggaggcgcaggtgtccgacgagaaggccccgttgtaaatgggttttttcccttccaggaagcctacccagatgccgcaggtgatgcggctgtcatagccgaacagccagttgtccgcaaagtcatacgtagtccccgttttcacgccccccttgaagtctttcggcagatgcggggccacgcgctgggcggagccgtttttcagggaggaattcaggatgttgtggagctggaaggccgtggcggtggaggtggcccccttccgcacctgggcgttgttccgggtttcaatggcctggttggattcccagatcaactggccgtcctcatcctctatcctgtccaggtaataaatatcctgcgggcgggagccgccgttcgggatggcggtgtaggccagcgtcatttccttcagggaggcgggttccgtgcccacgaaaatcttggggcggtaaacggggttcacctccgtgctgcccgcttcacgcacgggcttgcggatgccgaagtccgtgagctttttcacgaagggggatgtgcccatgtccatccccatgcgcagggaggcggcaatcttggaggcggacaggccgcggtgggcggtaatcatgccttcatagcggtttttggagctttccgcgccccattcccccaggatgccttccgagccgccgatgcccgtcaggcggttgtcaatggcgtcgtccagaatgcgggtgacggggcttttgcccgtgtcaaaggccgtagcgtacaggaagggcaggatggcggtgccggtggggcgggcgccgtccttgatggcgtcatactggcgcttggtgtagtccctgcctccgtggtaggccagaacggcgccggactggttgtccaccaccagcagggctccttccaggtagcgcggcttgtccccggaggcgccgtggtagtccgcggccttctggtggcggtagccggggcgtttttcaatgttttccagggcctgttccagggatttcccggtggcctcctgaagcttcctgtcaagggtggtgtaaatcttgaggccggcggcattcacgcggtcctcccccagataggcggtaatctctgcggaaatgcggtcgtaaatgtgggagacgccgcgtttcagcggcctggggttgagccccaggtccatggcggagaggcgttccgcttcatccggcgtaatgtacttttcccgtgccatgcggttgagcacatggttgcgccatttcaggttgctttccggattattgaggggggaaaggccgttcgggtttttaatcagggcggcgatggaggcggcctcccgcgtagtgaggtccgcaggttccttgccgaagtagcccagagaggcggcgcggatgccgtagaacccgctgccgaagtaaacgcggttcaggtaaaactccagcacctggtccttgctgtaccgttccgtaatgcggcgcgccagcgctatttccacgaatttgcggccaaagctgccttcattcctggccttggcccggttcttcaggtcgtacgcgtttctggcaagctgctgggtgatggaagaggctccctggttggcgtccccgctgttgtggatgtattccctgcctgcccgcaaaatccccaggaagtcatagcccggatgttcccggaagcgggaatcctcctgggcgatcagcgcgttgaccatggcgggcgaaatcttgtccagcgtgacgtagctgcggttttccacataaatgcggcctatttcctccccgttccggtcgtaaatgatgctgggcttttccaggtcgttgatgcgttccaggtcaaactccgccgcccagttgtcatagcgtttccaggccatcatgaagccaaagtagcccacggcccccccgatggcggccagaaccaggcaccacagcaccagcttccggatgaagctccagaatcgcttcctgggcttggccttgggttggcgccttttgttggcctgcatgtgcctgcgcggagcttgtgaacttaattcagccatgaagatgaagcaggatttgtcctgggaggagaaaaaacgtgcaaaaatcctagcggattcccgtttgtttagcaataccgtacactgttggcgagcgaaaaaagaaggcatgcgtcccgggaatctcccggaaccccgcaggctactgaatcatcctgcgtccgcaggacgcgccggctttaaggaaaaagcgcgtccgttccccgcgcgtttatattttaatgccgcaagggcttgcggcggtccgggcggctaatggtcctgcacggcgttgaaaatgttgcctgccttcgtgatgccgtgttccatggtgtacagcacggcgtccgccgcctttcccagcatcacgtccagaagctcgcgttcctccgggcggaatttgcccagcacgtggccgatcatctcccccttgccgcgtggcaggccgatgccgaagcggaggcgcgggaattcctgcgtgcccatgtgggcgatgagcgacttgatgccgttgtggccgcctgcggagcctttttcccgcagcttcatcacgcccagcggaaaatccacctcgtcatgaatgacgaacacgctgcgcgggtccagcttgaagaagcgcatcatgggccccacgcacaggccggattcattcatgaaggtggcgggcttcaccagcaggacgccggggccggccgccagctcgcacttgcgctgcctgtccgtcttgaacacggcgccccacccggcagccaggcggtccaccaccatgaaacccgcgttgtggcgggtatcttcataagtcctgcccggattgcccaggcccacgatcattttaacgggtgcgtccacgatggaagagaagaagaaaaaaatgaaaactgccgcttacggcggcacggaaggcgcgcgggaaatcctgcacccgttccgcggcgcaatcaaccgttccgtgagacagccgggcgcttatctgcccgctttcttcttctgccgccccatcaggaacccggtcagcacgtcctccagggcgtccccggtcctgaccaagcggtaatccgcgttaatgtccgtgcagatgcggcgcgtttcctccaggtagccggccacgatggcgcggtactcgtccgcgatgaggtccggttccgtaatcagggagccgccgccctccatgtccacaaagcggatggggcggtcaaagtcaaaatcaatttccagctggtccaccaggtggaacacggccacgtcatgcttgcggaagtggaggtgccggagggcgtttttaagttcctccgtatccgtgaacaggtcggaaaaaatcagcaccagggcacggcggctgacgcgttccgccagttcatgcagggtctccgccagcacggtttcccccttggggtactgcgtatccatctggctgatgagaacgttcaggtgggctgggcggcgggaggccggaatgtgcagcgtggcgccgtccttcgtctgccgggaaaagctcagccccacggcgtccccctgccggatggcgatgtaagccaggttggccgccagcctgcacgcgcgcaggtacttggactccacctgctccgggtggtaattcatggagccggaaaggtccaggacgatgtaggcgcgcaggttggtatccgcctcaaactccttgatgtaatacctgtcagaccgggcatacgccttccagtccagccggcgcgtatcatccccggaaacgtacttgcggtactccgcgaactccacggaggagccgcggttggcgcttctgtggcggccggatacgttccccgtcatgctgtggcgcgcttccaggggaagattccccaggcggctgagcaggtcgtggttcaggtacttcatgggtgggcagggcaagggagtggataacgcggggacggtcagacttccgccgccaggcgcgccacggccttgcggggcgtgatgccctgggactccgcggcgaagttcgtgaccacgcggtgcatcagcacgggctccacaatggcgtctatgtcctccttgcggacgatgtagctgccctggagggcggcgcgggtcttggcccccagaatgaggaactggacggcgcgggggcccgcgccccaggccacgtactgcttcacccattccggagaagtctccagggaggggcgggtggcgcgcaccagcttcacggcgtactcgtaaatatgttccgggacgggcacgcggcgcaccaggtcctggtaaaaaatgatttcctccccggagaggacgtgcttgagctcctcgctgcggtttccggtggtctcacgggcgatgcgcatttcctcctcctccgtggggtaatccacttcaatcaggaacatgaagcggtcaagctgggcttccggcaggggataggtgccttcctgctcaatggggttctgggtggcgagcacgaagaagggaggcagaagggtgaaggtgcggcccatgacggtgacgcggcgctcctgcatggcttccagcagggcggactgggtcttggcgggtgcgcggttgatttcgtccgccagcacgatattggcgaagaccggacccttgatgaactcaaactgccgcttgccgccggcggaatcatcctggatgatgtccgtgccggtgatgtccgcgggcatcaggtccggcgtgaactggatgcggttgaaactgaggtccagcgtttttgccacggagctgatcagcagcgtcttcgccaggccgggaacacccatcaggagcgcgtgcccgcgggagaacagggcgatgctcagcagctccacgacgcgttgctggccgatgatgatcttgctcaattccgcggaaagctccttgtaaatggcgccgagccggtcaatggcggctacgtcgtcgtcaggcagagatggggtggtgggttccatattgcatgtacataacacttttcatgcccttttccatcaaataatcgcgccgcattcattttccctgcttggaatgggaggggaaacggggtaaggaaggggcatgccgaaaatcgcactcattcaactgtccgcagacgcccggcccgccgtgaacaaggaaaagacggaagccgccatccgtgaagccgccgccaacggggcgcagatcgtctgcacgcaggaactctttaccacggaatacttttgcaggacggaggaatgcgaccttttcaacctggcggaacccattcccggagaactgacggaagcccactgcaagctggccgcggagctgggcgtggtgatcgtggcctccggctttgaaaagcgcgccaccgggctgtaccacaacaccgcgtgggtagtggacgcggacggaacgttcctgggcatgtaccgcaagatgcacattccgcaggaccccggctttgaggaaaaattctatttcacccccggcgacctgggctacaaggcgtttgagaccaaattcgggcgcatcggcgtgctcatctgctgggaccagtggtacccggaagccgcgcgcctgacggccatgcagggggcggaaatcatcttttaccccacggccatcggctggctgccggaggaaaaacccctgctgggggaacagcagcactgcgcgtgggaaaccgtgcagcgcggccacgccgtggccaacggctgctacgtctgcgccgtcaaccgcgtggggacggaaggggaaagcgaattctgggggcagtccttcgtggcggactactacggccaaatcgtcgccaaggcccccgtcagcgatgaagccatcctgtacgcggagctggacctggacgcgctggaagaccaccgccgcatctggcccttcttccgcgaccgccgcatagactcctacggcggcatcacggaacggtggggaaagtgaccctgtgggaacccggagtcatgtttccgggtatcccgtggaaaggcagtgctgtgaatggggcctcgatttcctccggggcatgccgggagggtagctgcctccgggtggatgagtgacgctccccactggagaaaatggcgtaaaaaaccgccgctcccggaggaacggcggtgtggtaaaaggagatgaatctgcgcttagccgcagatcacggcaatcttgatgcccttcatctggacgttcgtttccagggcctccgtgatttcatccagcttgaagcggtgggaaatcagcttggtcagcggcaggccgatgccgtaggcgcgcttcaggaagtcgaacgtggtcgggtaatcctgcggggaatacacccaggagcccacggcggtcacttccttgttgcagaggtcgtaatggtggttgatgacgctttccccgccgtccatgaaaaagcccacttcacacaggccgccgccgcgcttcacgaacttccaggcgtttgccccggccttgcctacgcccgtgcactggaagacgaaatccgccaggcggccgccgttatctttcttcaccgcgtcaaggaggccgtccaggtccgcgtaatgcgtgaaattgtaggttcgggaggcgcccatttccctggccagttccaggcgggaatcattgccgtccacggcgatgatggtttcaatgcccagcgtgcgcagcgcggcgatctggagcaggccgatagggccgcagccctgcacgagcaccacggaattgaacttgagcagtccggtggacttggcgcgttccagggaatggaccaccacggcggcgggctccaccagaatgcgctggtccagcgtcatgccggaaacgttgaaaaacgtggaacccttgcggatgaccaggtactccccgaagtagccgttcaaatgcacgtcgtcgtcaggcatcaggccgtacacgcccacgttctcgcacaggttggtgcgggccggggtattcaggcaggcgtcacaggtgccgcaggggatgatgcaggtgacgatcttgtcccccagggccaggggattgcccgccgtgtccttcgtgatattcctgcccatggcgacgatttccccggtgccttcatggccgagcaccacggggcagaggccgaaggggtcccggttgtactcgtggccgtccgtgccgcaaacgccgcaggcttccaccttgatcagcatttcatcatccccgatggcgggaatggggtattcacggatttcaaatgtcttgggagctgtcaggacagcggcgcgtgcggtttgttgcatagtgctcctacactaccctttgccgtttgaactcttcaagaacaaataaaaatgaaagggaattaacttgctgaaaacggagaaaaaattcccttttgccccttcttgcaatactcccgcatccagggaaaacgcataaaaacagtggtttccggaaactgttcagcaaatcttccgctgtctctccagctatcatcaaaaagcctccgggagcgcttcatggcatgcggcgctcccggcatgtttttctgcaataactgcgccgcgccggcacaaaaggcacgttattgcaggtgcagtttttccatgaaggtccgttcatttggcttgcgtggcggagggatggagtgcaagctgtgcgcgttatgctcgacatccgtgtaatacgagaaaatccggaagaagtgaaagcgcgtttgaagccccgcagcggcgacgcgtggaagcttgttgatgacgttctggcgtgcgatgaagcgcgccgcaatgccgaaacggaaaagcaggccttgcagtccgagcgcaatgccacctccaagcagatcggcatgctcaagaagaagggggaggacacctcctccattgaagcgcgcgtgcgcgaaatcggggaccgcatccgggagctggaccgcctggcggaagagaattccgcccagctcacctccctgctgatgaacatccccaacctgccgcatccggaatgccccgtgggcgcggatgaaacggccaacccggaagtcaagctgtggggagagaaacccgccattgagaacccgaaggaccatgtggagctggccgcgaacctgggcatgatttcctttgaagacggcgcgcggatcacgggctccggctttgtggtataccgcggggcgggcgcgcgcctggaacgcgccctgatcaacttcctgctggacacgcagaccggggagaacggctatcaggaagtgggcgttccctttgtggtcaagcgggagtgcatggaaggcaccggacagcttcccaaatttgaggaagacatgtacggcacggaagaccagcagatgttcctgattcccaccgcggaagtgcccgtgaccaacctgtaccgggacaccattttacaggaaagcgagctgcccatcaagatggccgcgtatacgccctgcttccgccgggaagccgggagcgccggacgcatcaaccgcggcatgatccgcgtccaccagtttgacaaggtggagctggtccagattctgaagccggaagattccttccgggagctggaagtgctccgcagccatgcggaatccattcttcagaagctggggcttcactaccgcgtgattgaactttgcacgggcgacctcggcttttcctccgccaagacgtatgacattgaagtatgggctccgggccaggggcagtatctggaggtttcctcctgctcctgctttacggactaccaggcgcgccgcatgcgcctgcgctacaaggacgcggacggcaagaaccagttctgccacaccctgaacggttccggcacggctctgccgcgcctgtacgtagccctgctggaaacctgccagcagccggacggctccatccgcattccggaagcgctcgtgccgtacttcggcgcggacagcatccgcccggaacagggctgaaccggcattttcacgtcccaaccctgaatcaagcccatgcctgacgagggcccgctggaacactacctgactgtttcccatgagccggagccggacgttccggaaccggctccggaacgcagtcccggaccgtggcgggagaggggaatcatgctgggcctgggctttctgctggggtgcatcggggcgtatgcgctgatttattcggaaatgtccggcggcatgcggacgctgaaagagtcgctttcagaagaacgcgatgcgaatgcctccctgcaaaaggagcgtgcccatttgctggaaacgctggagcagatgcgcatggacagcctgctgacggaacgttcccccctttccatgacgggcaatggcattcccgggacgagccgtcgccccgttccccagcctccgccgcttacgccgctgccttcccgcgggcaggctcccccggctcccgcgccggaacccggttccgtggaggaccgcctggtcaatcccggtccggaggactggaaggaacgctaccagtacgccgctttgaaatacaaccgggtggtggaggattacaacaggctgaggaagctttacatgaacctggtgggccaggggggagccgccagcggactggtaacgggagcccagttttacaaggccctgcggaaggatacgcgggtggaggcgcgcaagctggatgaacggtacatgaagggagggctgcgcggcagcgagctccgggaactggaacgcagcagggatgaaatgcggcaccgggactggtggctgaaaaaaatggcgcgccagttccagatagattgaacgggggggaggacattcccgttgtgaggaatagtccggtgaagcggctggcttgatgaaaggccggacggggcaggcagcgctccgggattccatgcagccataaaaagaggcttcccggagaatggtcctttccgggaagccttgtataaataataaggccaggagcatgaaagcgccgggccttactggaagtgtggtgatcaggaagaagcgaaagttcttcccgcaattttaccgctgttagcggcggttgcggccatagccgttgttgtcgcgtctgccgccgccgccattgccacggtaaccgcctccaccaccgccgcctgtgttggcctgcggtttggcttcattgacaaccagggggcgaccctgaaactcatttccgttcagggcggaaatggcatcgttcatggaatcggtggaatccatggtgacgaatgcgaaacctctgggccttccggattcacggtcggttggaatgaatacttcagtcacttcgccatgggaaccaaacaaatccctcaggtcctgttcggtggaattgaaggacaaattccctacgtacatttttgtgttcatatgatcaaaagacaagtgatctgattattcttaaatgcattcccgaagagccgggattagaagttaaaatccgaatacgcagacaccattgtctataggacagaatatcctctggatattgaaatgccaagaataatatggctcatgcctgattatttcaacatccggcttccatggatgccgggaaccgcagccttttgagaagaaaactcccccccgtcagcacagttccgccgcaatggcgtccacgagcagtcggccgcggcctttcaggatgagcctttgttccggggaaatgtccgccaagcccagttcccggtattgttccagcagggggcgggattccggaaggatatatttcaatggcagcccttcatccgtccggagcatcagggcaatgcgttccaggcggtagtcttccgcggtgacgggttcctgttcggagagggggaggccgttttccagcgtgctgcgtatgtaggcgtccgtgtcccgcgtgttggaataccgtatgccgttgatggtgctgactgcgccggggcctatgcccacgtagtcctcacccttccagtacgccatgttgtggggggagcggcagccctcccgggcgtagttggaggtttcatagtgttgcatgcctgccgcttccagcatgtgttccgccagttcaaagtaggctgcgtcttcgtccggatcctgccttttttccccccgcagcaggctccggaagaattccgtgtcttcctcataggtgaggttgtaggcggagacatggtccgttccggcacggacggcttccctgagggtggcttcccaggtggagagggtttgccccggaatggcgaacatgaggtccatgttgatatggggcattcccgcgtttttcagcatttccacggagtgcagggcctgttccggggtgtgttcgcgtcccagcagatgtagaatgccggggtccagggattgcacgcccagggagacgcggttcatgcccaggctgcgccagaagcgcacttttttttccgtaaaggtggcggggttggcctcaaaggagaattcgtccagcctgtccacgggcacgagccggtccagggtttccatgaggcgtcccaggtgcgtgtccgagagcatggaaggcgttccccccccaaagtagagcgtggccgtttcccccccgcggtccgtggacagggcggcggcgcgggattccgcctcccgccccagcgcacggatgaagagcttcatgtccgtggaggccggcgtgtgcttgaagaaggcgcagtacgggcagatgcggtggcagaaggggatgtggacgtaaagatgcacggggtgcggcgggaatcagcgtctccggcggcgtccggaggttccttccccgtcgcccttcttgttctgggagagttccagaatcctggcggaagcctctttcatttccgatttgacgcgggatttttccgtaccgtcggccagggacatgtagttcttcgtcagggcactgtagaaggggtgaattttcgtttccttcttgttcttgggcttgtacctgaacccgtccgggcaggtgtccaccatgtttttcatccaggggatcagttcctccttgggcagggccaggcacagggcgtccagggagaaggacatttcctcctgatccacgtccttgggagcgttcagggcattgttttcatcccggtagaagttgacggctttcttgaagcccctgtccacggtcctcttgagcctgtccgtgccctgggccttggcataggctatctggtaggcggcctggggttccgggtaggagttgcgcttggactcggacttgagccaggacatgaggtccgcccactggaaggtcttgtagtcatgttcctgcttcagggcgttttccagaatcacggagcagagcacattgacgtattccttggcgtggttggccagcatttccttgccgtttttgtccccgcggcctacggaagagacgtatttgcgcgttttccagagctttctgatgcccatgccgtccggaagggcctcacgtacttcatccaccatcttggtggcccccatgaggtcctggggagcctgcttgaagagcgtgtaccaggcttccgtgtagaacgggttggccttgagaacggttctcatggcggtctgcgtgaattccctgggcagcgtgccggaggggtcttgagcctcttccgtggaagagttcgcgcccgcgagcttgtagatgttcatggcgaagcggctgtcgatgaatttctcgtagtcgatgttcatggacagggccaggccggactggtattccgcattcccggtgcgcggcgccttggagtcccggaagtaccagaatcccgtggtggctttcagggtgtctacgctctggcccacgctcagccagcagccgttgccgttgaagttggtggtcatcaggttgccgtggccgggctgtccggcaggggcggcggggatgccgcgggcaatctgggagttgcgggagatgagagacatggtgccgcaaacgccgccttcatgaagcttgcgttcattggattcccgggaccattccggatcagggtcaaagctgaacaggatgggcggctccttgtcgtcatccatgcggtaggggccgtacagccagaggcgcgtcgggccgcgctggcccatgtagcgttcccacacgctgtcgcattcccgcagggggcgcgtttccgagagggccatcatggccggccagggcgttccttccagggacacgccggtccattccacgcgcttgtggtccacgtcccgcagcttgctgcagttttcatatttgtccaccaggtaggtgaagaattccaccggggtggggaacgggtccctcttgcgcctcagctggccgtggcggtacaggtattcgtgcaggaagccggccaggttgccttccgtaatggcggtgtcccctatttccgagaccgtggggtatttgttgatccatgcctgcttgggcgtgattttcttgcggtccaggtaggcttccacctttttgtagcattcttcatccaccgtgcgcggagcgtttccataccagttcacgggaggcttgccggcgcagtacaggtccgcgggcggaggcatgacgccggaggacctcaagccgttcagcttgcccagggcgtcaatgtagcggccctgctgggtgaggtcgaacgcgcccatgccgaattcgcggcgtcccaccgcaaaggccaggacgagctggttgtatttttccgtcgtttccaggcccagttcatcaatcatgaaggccacgttggtggcgacgctggggtccggcgggaagaacatggcgaagacttcgcggttgttcttcgtgtttttcagccatttttcaaagtccggggagaaggcgccgccgcgctttttcacgtagtcgcgcacgtaggcttccgcgtaaagggggtatttagccagaagcttttcagaaaatttgcccttggaggccatggcttcctcccgcagcgccttttccatggcgatgacttgcggggagggggaaagatcgggcgcgaccggttccggctcaggctcaggttccggttcaggcgccacgacgatgggttccggttccggggcaaccaccacgggttccggcttgggcggagcgggcttgggtttgggcttggggggaaccaccaccggagtcgccacggttttggcgacgggttcctttttgtccttgaggatctggtatcccaggaagccgaagaggacgagcatcccggtgatgatgaccgtgatgacggggaagccgccggagcgctttaccttgggtagcggcgcgccgggcgtgacggcgccgattaccggcttccggagctggggctgctgcggctttttggccgggcgcagggcctgggcgtgggcaacggccggctggggctgtgccggagcttgagcctgcggctgtgccagcgggtaaaggaagagcacggtgccgaagcccctcagcttgccttccgcattggcggagtactgggtttcaaaggcttcctgcgcctgggagaattgagcccggttttccggggccgcggacaattccccggtagccaggtcacgggtgacgaggccctgggggcagaattcacgtatcaggacggcctggccttccggggagatggcctggtacaggttataatccggaccgctttctacaagcgccgtgattctatagccgcctatgttgaaatgggacggaagggcaggggtttgaggaactgtcatgacgaatcaaaagatcaaagactcatttatttaaggaggtccggagccttttgtcaattccggagtgcggaagctgtgccatggcgtccgcatagcgcgggcacccgtctggaaggaggggaaaacctcgtttcaaggaagccggaagagggcctttttcctccctgcgagcagggagccgccgggaagggctagcggatggtgacctttgttccgagaggtgtgtgttcaaagaaggtcttggccatgtctgccgggagacgcacgcaaccgtggctgaccgggtatccggtgacaaagcccacgtgcatgccgtagccgcccgtaatccgcatccagtagggcatgggggcggggtcgaagtaggttcctgcgggcgcgccgccggccctggcgttatagtccccgttgacgacggcaccggtggatttgctgcgcagaacgccgtacgtgccggatttgtagttggcgtccttctggataatcttgtaggttcccctgggcgtgccgaagccttccttgccggaggacatgggagagacgcccaccagcgtggcccctacgtagtagaagactttctgctgcttgaggtcaatgatgatgtgcttttccccctggatgcccgaaggcaggtcccagtatccctggcccaggcgggcttccggcggcaggtccgtgttcacgccggaggtggcgcccacgccggacaggtagctgtcctggccggacgcgccctggattttcccggcgattttatcaaacagggggggccttccatatggattgcaggaaacgagaatggaactgatagaagctaatgccagtatgccgggtttcatgggaacgggagaatgacaggcaggttatggagcctgtccgcccttttgtcaagatttgcatgctgttatccgttgcttattccgggggtatctgttatacacggcgcaaccacctcatccatccatatctccatgagtgaacaatacgaccttctgaaaagcattcttctggaaaaatccgtgcgcacgggaacctttacgctggcttccggcaaggtgtcagacctgtatgtggactgccgcatgaccgccctggaccccgtgggggccacgctggtgggcgcgctgggctggaagctggtgcaggaggagattctgccccgtttcccggaggtggcggccattggcggaatgaccatgggcgcagaccccatttccctggccgtcggcatgaccagcgctctggaaggggctgaaaagaagctccaggtgtttaccgtgcgcaaggagccgaaggaccatggcaggggacgccgcattgagggcaatttccaggccggggataccgtggtggtggtggatgacgtcattacgacgggcggctccaccctgaaggcgattgacgccattgaggcggaagggggcaaggtagccgccgccctggtgctgctggaccgcgaggaaggcggccgccaggcgattgaggaacgcggcattcccgtttatcccctgtacaccaggacgtccctgctgggcaaataatttttttccgttcatgctccccgccctgatcggcataagcggccatgaagtgggcgcggaagaggaggcggccatcctgcgtttgcagccggccggcttcatcctgttttcccggaatgtggattccgtggagcaggtgcgcagcctgacggaaacgttgcggaagctctgccgccaccatcccgtcattgccgtggaccaggaggggggcagggtggtgcgcaccgcttccctgggcctgaatttgccttctcccgcttctctggcgcggagcggcggttttaacggcattgtggagctgggcgcggtgacggcgatggcgctccggtacctgggggtgaacctgaattttgccccggtactggatatttgccatgacccgtccgcggccaatgcgctgcccggccgctgctggggagacaatccccaggacgtgatttcgcgcggaggcgtttattcctccaacctgcgccggggcggcgtgcaaagctgcggcaagcattttcccggcatggggcgcgcccaggcggacccccatttcagccttcccgtggttgacctggatgaacgtgagttgttcaagacggacctgctgccctttctggccctgtgtctggagctttcctccatcatgtccgcccatatcatgctgccgcagattgatcccgattatcccgccaccctgtccgaacgggtgatcagggggcttctgcgggacaggctcggcttccggggagtggtgtttacggatgatttgtgcatgggggcgattgcggcgcggcatgctccggatgaagccgccctgctttccctgaaggccgggtgcgatcttcccctgatttgtcatgaccccctctcctggctggacggcgtggcttcccgcctggaaggcctggacacctatgaccgggatgattccttcaagcgggtggaagcgctgagcgattccctgtgcttcccgtttccggaaaaggcaggactgtgggattcctgcctgcgccgtgcggaggccttgtgccgcctggcggaaggggaggcggatgaagagttgccttcctctccggtccagaagtattgatcccggtttgatgggaaaggcgcgcctgaatcgccgcatgccatgtggcgattccatcacttggacgaagcgaactgtttctccttttttcagtcaggggcatcctgcggatgaagggtgtttcagttgccgcatggacatgcggaactctctggggcgttataaaaaagcgccgctgcatggggaagtgcggcggcgcgtgggtaagaggttggaaacgggatcccgttcagttggccgccaggcgtttgggggcggcgggttttgcggaatccgccttgtacacgtgcagttccgccaggcggaccttgccccccttctggaagagcttgacgcgcagcctgttggtggtgataggctcaaacgtcctcatgcacttgataaagccgttgccggggagctggagcatgcgcagcacctccggttcattggcgtacatggctttctgagcatcgctgacgccggcggtagcggctcccagggaaccccagtggatgggaatccacttgccgcccttgttggcttcaatgacgaggcggttgtaccccttttcaatcttgatgtccacggcgcgcagggaggcggtgtttttcagggagagttccagcaccaggggatcgtcttccgtgggagaggcgtccagttcctcgatggtggtggcgtcccggtccagcagcttggcggtgtccacatggcctccggtggaggctttcagcttgtagtccgtgatttcctccgtggcgctgcccagcagcttcagttctcgcacgcggcattccaggccgtgccagtccgtggaaacgcggaacaggcagcgggagccttgcgtcaggcaggagtcgttcggggagacccaggttttctccttcttcttgtcggtttcatcatacacctctatctggttgccctgggaggcggcggagatgtaggtgccgtccggcaggtggaaggagcaaccccagttgccgtggtcgcggatcaggatgcccggcacccacaggtggttgcagttggtgaccgggtgggctttttccccgcagcccacttcaaagccgcctacggcgatggggcggtcatattccacgtccaggtcgttcacgcgccatttgattttggcgctcattttctgcacgcccggctgggtggggccgctgagctccttcttgtaggagtacacgttccactggccgccgaatttggagtcgggggtccaggaaatggtttccatgggggagaaggtggtggcgtcactgaattggacggtgccggcaaagtcgtacttgtaggcggaattggcctttccttccagttccttgtcacgctggagcccgagggcgcggccccccagcggctgctggacgtccacgttcagggagtattccccgggctggggcttgtcgtccttccgcttgggttcaaagaagatgcgcacgtccatgcccaggatcatttccgcacaggtggccttggtgagctggtccaggccgggaatggccatgatggccttggcgacgggaagggcccgggcattgacgacgctcatgagcttgaagcggcagccctgttccacggggatgtttttcaattcccggatggcggatttcagggagccgggagccttggcgcccagcgcggcgctgaccatggaccagttgcgcacataggtgttcaggaagcgggattccgtgtcaatgatggggggaaccttccggaaggatttggcctggaattccggcttgcccgtgatcgccaggttctggcgttccgcgcacagagccgtgatccagacgctggtgcggatgtaggtgccgatgaccgggtctgccgtcatcagttccaggcggttggggttttgcatcatgcctccgtcaaacgggcgcaggagcgtcagcttccagcggaacgcctccatgttcttgtagtagacttccgggttcgtccgccagtaggcgggaagggcccacatgatggagagcgtctcggaggagtggccctggtcgcagccgccgatgggaccttccccgtacatgatgcggctgtttttagtgtagagttccggtcccccgcagatgagggaggcgatgtagtacgggccgtggcggccggagtaggtgcccccgcattcgcggttgggttcaaaggtgaaggcctccgtcatgcggccgtacgggcccatgccggtggggcagatggactgggcgtggtccatcatcttgtccagcacgtcgtcttccgtgcgcgccggggtcttgctggccagagccaggaacaggcacatgtgggagccgccgatgctgacgcccgtgcccgcatagccggggtggatgccgtggccggtgacgaagtccccgtaaagaacctcgtttttcatgcgctgcacgccgttgcggatggccggcagaacggagttgtcccggtagcgcagccagtattcgcacaggaagatgcccgcggaggcctgggggacggcccaccagcactgggagccggagaaggcgatgtactgagccgcctttttaatgacgggatcatatttcgggttgcccgtggccatcagggccagcccggcccagcccgtgtcgtagtggttgccgcagtagccgcccgggcgttcccaggagccgtcctcgcgctgctgggccgccagccattcgctcatcatgtggaccacggccttgctcttggcgcagtttttcgggaagccgagagcgtagcttcccagctggggaatcttgaacgtgacgtttttcacgtatttcttcacggagtccggcagggtggcggaaccgcccacatggacagccacacccacggaggccgcccctccgggcgttccggtgcctttcagcttccagtctcccttggggatgtcaaagaccagggaggagacggcgtgagccagccacaccttgcgctcggggtcatatttggccgcgccgtagcccacgctgtattgcaggggcttgagcttggtcagcggaacggggccgccggggccttccagcctcaggtccgaccattcgaagccgtcgctgccgatgccgttgccgccgtcatccacatgaaggcgcacctgctggcctcccttcaccggaatggagagggagacgggctttttggcccgttcctcccggaagacttccttccagagcggctggatgccctggattttctccacgttttccgcaggaatgaggttcagggtgatttttccggcgccttccgccttgtccaccagcaggcccgcgtgcatgtccaggccgcgcctgtcctggtgctggtagggaccgtaaagcacatccaggctttgggccgtcttgaagggctggccgtcaatgcccaggatcaggtcgccctccttcacgtatttttcagcaggggagccttcaatcacctgggtgaccatgtagaggttcgccacgggttccccgttggggtccagcagggtttttgggaaaaagccgcggaagttcgtgtccggccaggaggcgtccaggccgcgggcgcggaagcccagagggccgaaggtggtgatccagcccttggccacttcctcggagttgccgaaccagctcgtgtacaggttggcgtactgcttcctccactggttcagcgtcatggccttggcgaattttttcacgtaggcgttgacgtcccccatgttggtggtctgcctggcggcttttccgcgcggccggccgggggaggcgggtttgacggcagcttgtgccgccaggtccggagcatccttctgtttggtgggagtttccggttccggctgttccgcagacgtggcgtcgtctgccggagcgtccgcttctccggcaggctgttcaggttcgggagcaggttcttccgcgggggtggcggagccgtcttcgtcctgttcctcaggggcactggcggacggcgtttcttccggctgttccgctgctccagccgggggggcctccgcggcggcgctttcctgttcaaaggggtcttccacttccgcagcaggcagggcggctttcttttccggtttgggtgcttccttcttctcttttttgggctgcgtactggacggttcctgcggggcggcggggtcctccgcaggcttctgcgtgtagtaataggcgccgcaggcgcctcccagcagaatcaggataaggatccagatgccggcggagcttttctttttccggggctggggaaggggtaccgcatggacgggggccgctcctgctgcgggagtggccagggttctctggtcgcgctggaggggctccacgggagtaaccggaagcggggactgctccgcggcgggatgaacgccgggcagggcataaaccaggtacagggtgcccagggcggggatttcccccagggagccagtgcggaactgggcttcaaaatcgtttttcagcggaaggacttcctgttcgatgtccgtagtttccggataacgcagttttccgctttccggatcgcgcacggcaaggccctgcggacagaattcacggaccaggtattgcacgtggttggcgtccgacgcgtaatagacatggcagagggcatccgtctgcttcagtgactggataaggtagccgttgatattaaatccggaaggcagtgggggagtggtttccatggtcaggaggcaattgataatccggctacttattaccacatccggagagctctttcaatgtaaaagggcgctttccggctgcggcgtgtgacgcgattaattgattatttacttgaatacatggctattatgtggtgcaagcaaggctcgattttccgttttttcattacgatcatgagttccgacattagattagatgccttgcagtaccattcccagccccgccccggcaaggtggaaacgctgccctgcaagccctgcttttcgcaacgggatttgacgcttgcctattctccgggcgtagccgaaccctgcctccgcatcaaggaggatccttcccagagcgccctgtacacaggacgctccaacctggtgggcgtggtgaccaacggcaccgccgttctgggcctgggcaacatcggtccggatgcggccaagccggtgatggaaggcaagggcgttctgttcaaggtgttcgcggacattgacgtttttgacattgaattgaacgtcaaggagccggaaaagctgatcgaggttatcaagaccatggagcccaccttcggcgccatcaacctggaagacatcaaggccccggaatgcttcatggtggaggaacgcctccgcgaggaaatgaacatccccgtgttccatgacgaccagcacggaacggccgtcatctccggcgccgccctgctgaacgccgcagaactgacgggccgcaagctggaagacatgaaggtggtcgtcgtaggggccggggccgcgggcatttcctgcgccaagttttacatgacgctgggcgtccgccgcgaacatatctacatgtttgactccaaggggctgattcataccgggcgcatcgacctgcacgccacgaaggcccagttctcccagtcggaggactgctcactggatgaagccctcaccggggcggacgtgttcctggggctttccaccaaggggctgctcacgcaggacatggtgaagctcatggctccttcccccatcatcttcgcctgcgctaatccggatccggaaattacgtaccaggacgccaagaaggcgcgcccggactgcatcatgggttccggccgttccgactggcccaaccaggtgaacaacgtctcctgtttccccttcattttccgcgccgccctggacgtgcacgcttccgtcatcaatgaacagatgaagattgccgccgcccgggcgttggcggatctggcgaaggaacccgttccgcaggaggtggttgacctgtacgggggcgctcccctcagcttcggcatcgattacgtgattcccaagcccatcgatccccgcatcattgaatgggaatgcccggcagtggcccaggcggccatgatttccggcgtggcccagtcccccatccgggacatggaggcttacacgcttgaactgcgcaagcgcattgccgccgcccgggagcgcgtttccggcgtagtgcgcagttatttgtaaacggctccggcgtaaagccggaaaatccatgccgccgtggtacgcgcccggcggctgcatttggccgggggacgtccgttcccccggttttttatgccgggtagcggtgaggcggtgttgagcccttcatttggaaagaggccttcagggggggaacgcctccggcctctgccgcttccggatgaataggcggttgaagggcgcactggcttttccaatgttcgttcgtcggctctccgttttttcagttgccgcaaggggttgcggctctccatccagctgaggggagggaggggggcgttgggcggaacggttcagtgcttagccagcgcgtttctgacctgttccgtctgttcccggtccgggatgagttccgcgagaacctggctgttttcctccagggcgtcaagctggtcgaagtcttccgccgtccggataaccaggtagcgcatgccccattgttccgcaatggccttgaaggagtaggcgtggggctgcacaagcaggttacgcatggcttccgaatggctggccgctccgggcagggcgcggaagatgccgcccccgccgttgttgatgacgccgagcacgcgggttcccgtgtccagctgggggaggagggccagggcgttggaatcgtacatggcggtcaggtcccccacgagggcccaggaacgggaacaccgggcggagacccccagaaagccggagatttgcccgtcaatgccgttggccccgcggttggcgcggacgttttccgtggggacggccatctgggcgaagctgttccagtaccgcacgggcatggagttgcccaggtaaatgcagtcgccgtctgcggcaaagcaggagaaggcgcgcaccatggcctgctcgctgtccgggcaggtgatgagcagttcctccatcagggctttcctgcgcttgttcatggcgcgcaggccgttgacgtcccccacggggtccacgtcgcccagagcgtgcagaatggcttccaggtctccggtgacgacggcggaggggcgggccagcccggagaatccggtgcgggtgacggagaagacttccgtggaagggatgtcctccaggtcgcgccagaagcgggccacgggcacgtcccctattctgagcaggatggcgggcgggttttccctcagcagggcgtccgcatccgtcagggccagatgggccagttcctcccggaggccggaggtggcgtccgccaccacgggggctttcagttcattggccagccaccgggccggagcctgttccgtcgggtccaggccgcccagcatgaccaccagcccgtcgcgcgatttgaagcgcagggcccgggccagctccgccagggagccccggaagtcgttttcctccggaggttccgccgggtaaaggtcacagttcccgggattccaggcggggtccgggtccggcaggcagacgttgatgtgcaggggagaggcgtagtcccagtcttccagaatgtcttccggcaggctgtccggtgtttccagatcgatcgtgggcgcgtaaatgccgaacaggtccgcctgttcgatggcctgcggagcggcggagccgcggtagtccgccgggcggtccgccgtgagcaggagcaggggacggcgctggtagtaagcctccaccacggcggggagcagttccgccgccgccgtgccggacgtggtgaccacggctacgggaagccccatgtcctgaatgcgtcccaaggcaaagaacgcggcggagcgttcgtcaaagtgggtccatttcaccaggtcctccgcggcggccagcacctggagcagcgccatgttgcgcgcgccggggcagaccacccattcacagatgccgcccaggcagcactgggccagcagggatttgacgaaggatgcggaggcactcacgggaatcagccttgttttttggccgtcctggccgctttttcagccagtttggccttttcctcttccgagagaatgcgggggaagacgggggccgggtcattgatgcggtgcccggaggggaggattccccaggccagcgtatccggcgtgcggccccggaacaggtccgcggcgttgagctggtccaggatgcgggcggaagcgtccggcaggacgcagccgatgaggtagcccgtctgggcgcagcattccagcaggtggcgcagcacgcagcggaggcgcggcgcggcggcctcatccttggcaagctgccagggctgctgctgttcaatatacgcgttgcaggcggaaacctgggcattcagggccgccagggcgtcggagaccatgttgtcgtccatgtatttggagaacagggtgacggcctggtccatggtgacgcgcagggccttggaggcttcgtcatcgtattcctccgcaccggagatgacggagtcgcagtagcggcgcgtcatgttgatggaacggttgcacaggttgccgaggtcattggccagctccgtgttgtacagcatgaccaggcggtccgcgtcaaagttggcgtcctttccggtggtgatgtcccgcaccaggtaatagcgcacgggttccgggccgaattgttccgccagcaggttggggtccaccacgttgccgatggatttggacattttttccccgttgatgttccaccagccgtggacgagcagggtgggcatttcctcgtcggagaagcccatggcatgcagcatggcgggccagtatacgccgtgggcgggcaccaggatgtccttgccgatcacttcgcagtccgcgggccagagcttggagaattccggcagcccgctgtccggttccgccaggtaaccggcgaaggagacgtagttgatgagagcgtcaaaccagacgtaagtcacgaattccgggtcaaacggaagttctattccccaggaaaggcggctcttggggcgggaaatgcagaggtccgagtcaaagtcaatggcattgagcacctccgccttgcggaaggccggaagaacgaagccgctgctcttttccacgaacttcttcatccactccacatggtcggtcaggcggaagtaccagttttcttcctccagttccaccacttccccccattccgggccgaagctgccttccgcgtccctctccttgtccgtcaggaattgttcctggcgcacggagtagaatcccttgtaggattttttgtaaagctgccccctgtccttcaggttcgtcaggattttctgcacgcaggccttgtggcgcggatccgtggtggaggcccacccgtcattgctgatgcccaggcgttcccacagggccaggaatttggccgtgatgttgtccacatgctcctgcggcgtaatgcccagtttttccgccgtctgctgtactttctgcccgtgctggtccaccccggtcaggaaatagacttcctcccccttcatccggtgccagcgcgcgagaacgtccgcaaggactttttcataggcgtgcccgatgtggggcggtccgttggtgtagtcaatggccgtggtgatatagtacatgcggggaacgatactcctttccttccgttttgcaagcaaagtcactccctgccagtgttcggggagtgaagaccggcgtttgccctcacaccgccgggagcgcgcatgccgatgcggcagctgaaaagaaaatgaacgcaggagaacaaatattaagagagattccttgaatagcggcctttggccgtgcatttttaatgccacagaggccggcggtgctccccggaggtttttcccggacaaccccggaaaggggtgtttagccgtcctgttctttcagcggtgtttctcccagacgccggcggtgaccggctgggaatctggtgaaccgcaagtgcgtaaagttcatgtgatcgctttatccccggtttgtttgcctgtcgaacgtcccatcatgatacagcaaagggaagcgttcacgcttccctttgctgaaatggaccggaccttacggccttgaagcatttttgtcagaaaccgcgctcccggtaggccgcttccagctggttgagcgcccgttccaggatggagcgcgggcagcccgcgttcaggcgcatgaagccttccccttccttgccgaagatggagccgtcattcagggccaggcgcgctccgtccacaaagaattccgccagttccttctgaggcaggttcagttcccggcagtccaggaaaaccaggtaggaggcgtccggcagcatggccttgattttaggcatgcggcggcgcagttcccggtcaatgtagcggatgttttcctggatgtagtccaccgcctgcttgagccattcctccccttccgggccggagtaggcgctgatgagcccttcgtaggcaaagacatggccttccgccagttccctgccgctgacgaagctctggtattttccgaagagggccggattctggcagatcaggtaggagcttcccagtccgggcacgttgaaggccttgctgggcgccatgtacgtgacggagttcatgcgcgcctgttcggagacggtggcgaatacggtgtgcctgtggccgggaagggccaggtccgcatggatttcgtcagagacgaccagcgtgccgctttccgcgcagatttccgccacgcggcggagttcctccgggctccacacgcggccgccggggttgtgggggttgcacaggatgaacatgcggcagccgcgcacggcctcccgcatgtggtcaatgtccatgcggtagcgcccattttccagaaggagggggttgttcacgatttcccgtccgttttcccggataatcatggcaaagggatggtacaccggaggctggatcatgattttatcccccggttccgtgaagcactggatggcgctggaaatgccgggaacaatgcccggggcaaagccgatttccgaggcgcgcacctcccagccgtggcggcggcccacccagtcccggatggcgtcaaagaaggcgcggggcttgacggtatagcccagtatttcatgttcgcagcggcggcggatggcctccatgatgaaggggggcgttttgaagtccatgtccgccacccacagggggatcaggtcatcccggccccagcggggcagcagggcttcatatttcagggcgccggtgccgcggcggtcgattatttcgtcaaagtcgtactgcatggaatggtctgtctgcgcgggcaaaggtcaggaaagcggggtaacgccctttttcaggatgatgttgccgtatttggcggtttccccggtaatgacgacggcataggcctttttggcgcgttcatagaaggcgtagcgctccatttgttcaatgtccccgtcatagttcagcgccttgcggtatttggcttccaccgccgggtccagggagtctcccggcaccggggccatcatgatgacgggcgtggcgtaggcgtccagttcaaagagggggatgacggcgcccagcaaggcgtccgcccccagtccgtccgccctcagcaccgtggggttgaaggtgtggccgggaaagtgggcgtcggaaaagacgatttcatcgccatgccccatttccgcaagaattttcagcagggaagggctgatgaggggagagatgttttttaacatggtccgcagtatagcaccttcccgcgttccggtactaccataaaagttgaaggagcgcggatgattctccctcagccgttaacggcatgaaagcatttacggatgcattcttccatttcaggcatctgctgttccatgctttccaccagcttgagctgggtgcgcgcccggtgcaggttgtggcgctccctttccgttttaaagtagacatccccttccaggtagtccgtcaggaagcggatgccggtttccagcgtgatgagcagcccggaaaaggcgagtttggagatttccagcggtgtgatgaagtctttgacggcgtccaggtagcccttgacgacggcttcaaacatgggcatgcgcaggtaggttttgtccaggtcttcctcatcttccgccgcaggagaggtcatggtgcgcaccatgtccccgaagtcgtacaggatgctgccgggcatgacggtgtccaggtcaatgacgcagacggccttgtccgtttccctgtccagcatcacgttgttgatcttggtgtcgttgtggacgattctgacggggagttccccgcgctcctgaaggtccagcagcacgtccacgtaccgttcgcggcggcggatgaagtccagctccttccggcaggagtccaaacgcccgcgggagtccctggcagccgctttctgcaaccggtcaaagcgcttgcgggtgtggtggaagaacgggatggtttcatggatgtcctccgggttcatgtcgcacaggagctgctggaaggcgccgaaggcgcgggcggcctcatacgcctggcgcggatgttccgccacgtcaaacgtgtgtgtgctttcaatgcagttgtagcagcgccagaagccggaaccggggatttccaggtacttgcggcctccacgggcggagtacaggttcagcgtctggcggaagggcgttttcagcacccggagcatcttccagcggatgtggttggttaccttttccacgttgtgcatgacgtccctggggcacgggaaaacggcgtcattcacgcgctggaagatgtagcggtccgtggtgccgtccattttccggtaggtggcccggaaggtcatgttgatatggccgctgttgatggtgtcgcaatggaggaattctccggcgatggcgaaggcgtcgcccagggcggcaacctgttcctggagggaatcagtatggaaaacggcggacagaggcatgagcggggaaggaagaggctcccggcgcatgcggggaagtgccgggagccgcgggagtagggattgaaggaggcttagaaggagtaggtgagccccagccccgccacgaacgtgaagttgcggtaaattctggcggggattctggaggggaagcggtcggaaggaccgcggtagttgcccgccatgcctccgttgcccagccagacggtactgacgaagggggtgaggaccaggcggtccaccgccttgaagggcacggccacggtcacggaaatgccctgggttccgttggcgttgagggagtccctgtcaaagtagccggcggaggcgttccaggttcccgctacaatcagggaggaagacgggttgaagtcatatttgtagcccagcgtgttggtgaaccaccagccggacatccagcggaaggtgtattgcacgcggcagtcccagaagaagttttccagtcctttcccgaagtcgtggtggatgtccagtacaaagctgtgttcttcggaacggctgtgttcaaacgccgggaagtcgctggaggtctggcccagatggacgttcatcaggcccggcaggccgccgttgacgaactggtagcccagggaggccatcgtatagtcgctgaatttgcggctgacgcccagcagggccgttgcctcgtcggaaatgcccgtgctgttgtgcgtcaggtcattctgggtcagccactggtatttcactccggccaggatggagtattttttgttgaggtcgtaagcgcctatggcttccacgggaaccacatggtcgctgccggactgctggaaagccagtccgcggctgacgtacttggtagcgtagcccgttcccagcagggcggaaaacggacgggacgcgtcataagtggaattcagcgcccggaggggaatttgaatatcggcggaagccattcctgagagagcaaaggccgccgtgcatgccgcagcggtaatagttgtatattgcatggtttgccgacatagtaatggcgccgttcaattccgcaagacaatctttataaattcgaaagaattttcagttaaattacagcgggaagttataatggaatgagccggagaatccattccttcaattttaacagggttccttccaatttaagggacagttcgcggatgtgcagcagccggaacaggccgctccgcacgtagtcgatcagggagcaggcgaggtagatgcccaggctggctcccagcgccccggcggccgtgaagtaccaggggcaggcctgcaattccgcaaaccgcgccttgatgatgttttgccagatgaggggattgttatggatgaggtaaacggcaaaggaaagcggggcgaagaaggaaatgaggcggatggcggttccgctgctgatgcgcatgcgcgcgcaggccatgagcaggaagaaggaggacaggcagcagaacggcgccgtataagagacaaagagtttttccgcaatgcccggattgaggggaagataccccaacgcgattactccggcggtggggaggatgcagcacaggacgtagtaaagcgcgggccgctttaacgtgctccagagctggaagtgccccaggcagccgccgacgacgtacaggcagaccagccagatggcgctgtagccgccctggctgagccagttcccgtagccggatatggtggaaaagagggagaagacaatcaggaccagcaggcagagccacctggcggattccctgctgagggaacggatggccggattaaggaagggaataaagcagaacaggacggcataagccgtaaagtaccagtaggccaggcgcagcacgggaaagaatgcctggatcattcccttaaagcttacactgcccggcgcgagccatttaaataaaaaggttattccagcggtgtaaaagaaaacctgaaaccataagttgataaaacgggaaatccggtacggcacattgacgcccacgtagcctgtgataagggcaaagcagttgacggcgcagtaggcgctgagttcaagataccaggagacggcgtaattgggcgttccgaggaagctgttgtccaggttgccgccctccccccatttgagcacatgaagaaggacgacgaagaacatggacaggcaccggagaaggtcaatgccgtgatttctggaatgggccggggatgccatgagaaatgccaaggaaaaggtgatgctgctgggatcttacgccgggactgccgccattgcctgcaaacgcttcatgattttatttttcttcctcaacgttcttcgcggctccctccacggcccacgccatgaattcctccagcgtgaggtttttccggacggcggctttcatggcaagattgatgatccggtttttcaggggaaccgtgatgagggaagatacctcattggaggcggccagggcttcctggccatccatgaaccgcttgatgaggatttgggcatgccgggagagcttttttctgacaaagtagttgtcgatggcgcttctgttcatgccaatggctgaagccagcgtggagcggctgatatgattttcagccatccaacgccccagctccagaatatccacaagaggttcttccatgtggggtactttgctcattgtaatgatgaatcaaagattttgagcggagtatgattgataatcgctcaatgaatgtccttgttgaacacaataaagggtgggtgccatcaatgagtgttgtggatttcacagggagccgggtaatttttggagggaggcatacgccttcctttcttttctggatacttcatccattggtcagaaatgaataaaaaatcatcggcggcgttcttgccgcggcccgtaatccttgttgattccgttagggacattctccattctccggaatcttattgcttgaattaaagtttccttgccctttcttaaattctgccctgccgcatttgcaggggccggaacttggcgaatgcatccgggacaggcggctatggaagataacaaggcggtcccggagggacatggacggacagcgcatcaattcatggagatgcatgcagccgaagggatgagggcacattctttttctgcgtaaggaatgtgttttatcccaggcagaaactggcggaagcttcccccatgtggcttgggcggcatttctccggctgtgtccgggtattctttcccggtggccggggcgggtgtctttaatgggccatttgccctttaagccgccggctttcctgacggcggtttaacatgggccagatacggcagcaggaaaggggagaaacgtttcaaggcaaaatagaacagcacaatagccgtgaatgccagcagcggcgtgaacagggagaaggctccgaatttcatggaggaaggaaggccttcgtaaatgggcaggtgcagcatgaaggtcaggaagcaggcgggagccagcagggctattctggcggcagcgccgggcaggcgcttttccacccagatgcctgcgtacataatcagcatgactcccagcagcatgcccgcgaccgtttccgtccacagggaaaggattccggcggagtgcagcagaaccatcgcggaggaaacgagaatgctcacgcagaagacgacgccgaattttttgttcagcaccagatggatgtcgtcaatccggcgggaactgagcacgacgcccagcaggtagaaggcgcaggaccccagggagagcgtcaccagggggtcgggagccatgttgcagaaggagaaaaagaggagcagcgcgggcggcagcagtattttgatgcgggccagcagaggagtcagcagggtaagaatgatgatgtcccgcaggaaccaggaggggccgatggggggaacgtcatgagggaccgctcccaaaggagaagaggtccatgcccggcaggaagacgtcccggatgccggccaggtccgcaagctggaaggaattgccggcagggcgggagagaaggaacaggtacagcacgttccagatcatgtacgggatgaacagccataaagcccggtcaagggccttgttccaggtgatgtttcttgccagaaagtagccggccagcaccaggaagaagggaaccctgccgttgtagaagaggtggatgcccgttgtcttgagcaagggggaggacaggtgcacgtacatgatcaggagcgctgcaagcacccgtgacacgtcaatccatgcgacacgttttttagggatttccatggggagggagtttttccgcagcatgagccggatattgagttggcagagggttgaagttaatcaagggaggaaggtagggaaccgtccgggcgtcatgctctgcggatgcggtggtacgcccgtgccagcatttttcttccttttttcctgagccgcccccaccgggacggcggtctcctggtcagttttttctccgtcaggcggctgtattctgccagggaggcatccctttccccggagaacgcctgctgaagccattgccgggattgcgagattttctgttccagcagttcattgacggaggcgtagtccatcgtgaacgggacgttctccggcagggcttccgcgtcttcgggcagcatgcggtcctgaagacggagaaggttcagcagggagtggaagcgcccggagccgcgcatgggattgttgatgcacaagaacggcttgttgaagatcagggcgaagcagacgccgtggaaggagtccgtaatgaaaaactcgcagtggaggatgttgccgagccattcatataacgtggcttccttcatggtattgggcaggttcagcctgccgaggttgtccacctcctctttctggatgtccaccatgttcagcagggggagcccgagtttggaggaggcgtccagcaggagcttccttttttccgccgccgggtccaggatgtaggagacgatgcggcctttgcccgccggaggcgcctgccgtgccagctcctcccagcgttccctgcccagcaggaagacggggtccatcacccaggcgctttcacgcccatagtgccgcttgaggtgctccaccatcggtttttcccggacggaaacggcatcgaaccgtttgagcagcatggccgtttttttaagatatttcccggaaggttccgtcaactgccccatggatggaccataggcgattttccgtttctcccccctggcgaagtccaggaagaagaagtgacccatgaaaccctggttccacacctggtcggagcctaccatgaacgtgtcaaactggtcgtttaagtggtaggcgtagtccagggagtgcagcggcgttgtggaaatgcgctcccggaccaggaatttcctgaataccgtcgcagggtctttctgccgttccgtaaaggaaaaatcaatcagggaaacgctttttcccatttgctccagcaagcggtaaagggcgaaggaggtgagcacggctccatagttgcacgtcatccagacgcccagcaggcccacctccgcacggggcttgaagcgggccgtgtgctgcgccaccgcttccgtgaagggtttctgccggaggtcccggaggaagttcaggcgcgccagccgggaggggaaggcaggctgccgccggatgcccctgttggtgtgtttgacggcatgccagtcctcccggtgcagaaaaagctccctcccgcattggtttaaaagttcttccccgcggggggtgctcgccagcagcagggagattcccctggaatcatcccacttgggatggaagtatcccgcgccccagaagtcggccagggtcaggtcactggtgcgggggccggaagcatgcgggcagttgtagcatgcttcccccaggcagatgtctgacaggtacgcctgcatgaaaaggtcttccgtataaatgcgcgcgccggaaccggagccgtcccggtggaatttcatcacggagtagtggttccatccgtgggttttgtcccggaagttgatgcagcttatctgccggcccgtgctccgttcgtaatcctgccggtacgcgtcaaaaaggtttttggagggtacgccgtggcaggcgatgtcaatgatgaagaggctgtcccagggctttttcagacaggctctcagggccgccgcctggcagggcgtgccggaaaacaggaccgtttttccctctttcaggtccttcttgatgtcccggtaggcgtggccggggtccgcctgaaggtatttgctgccgttcaggagcttgagctccggcagggagtccaggcgcacatggcggacggaaagttccccgtccgtgttccacgccacgccgtagaccacgcctccctgtgcaagaatatgccgggccaggatggtgaatacgcctccgctggaggagttcaggcgcacggcctcgtccagcgcccaggccgcgtatgccctgggctcgtcaaacgcctgggggggccgtgcgggcgcattcaggtccgggcaggttttggtgcagaggccgcagtggacgcacgcttccagattaaccgcgggcgttaagaagccggaggggctccagttcatggaaatagcgtccctggggcagatgttggcgcaggcggagcagcccgtgcacagggtggagagctcaggcggggcgtcagtttttatcatggcgggaaggaatcagtttttgcagggggccgagaaacatgtcccgttcatcccggttgaggtagaaaaaccagatggttcccacggccaggaggccgtagcagaaggcgaaggccaggaaggagaaccagttgtccagcgttagcagggcaaccgctcccagccccgccaggatcatgacggcggagggcagcagcaggggcccgtaggtgcggcggaagaagagcctcatgtccagaccggcggtgcgggcgtagtagcggttgatcatcagcacctggccgatgaacagggaaatggcggtgccgatgaacattccgatggtgccgtagtacagggagataaagtagcccaggatgacgcagagcagggaggagtaaaagaggatgatggccctccccttgtggatgttgagggcctggaggatggcgaggcccgtgttttgagtcagcggaaccagcagggggagcagcacgatgacggcccccacccagaccgtgcctgtctggtccccgatggttttccccacccacaggtgcaggaagtcgtggccgcagctgatgaaggaaaccaggatgacgctcagcagggccagttgaaggcgccccacccgtatcatcatgcgggtgagctgctccttggtggaatccagggccaccatctgcatgattttgggggcaatgactccggaaatggcggtggaagccgtcatgaagtactgggagaacgagattcccagcgtgaacagggtgaccgcctgggcccccgccgtccttgccaggatgggagtgcccgcccgccagtagaacaggtccatgagctggttcagcagaatccagaaggaaaaggtgaacatctcccggtacagcttccagtcaggcttgcggaaaatgatgcgcacgcccaggcagcggatggtgtaatacgttccccacgccaggctggctacgccgatgcccacgcccaggacggtgagggcgatcgccttgtacccccataccaggagcagaaccgtaaggagcgtattgaagagggagaggcccaggctgaccagcccgggaacgatgaatttcatgtaggacccaggcacgcaggacagcggccgcagggggaaggccaggatgatgttgcccagcgtcagcaggtacaggattttcagggtgtcaagctccggcccggacagattgggaaacagggcgcccaggttcacgtagcagatcatgcccgccgcgaaggtgagcagccccaggaaggagaacagcatcatggcctgtcccaggaaatgggcctcccggtcgttctcctttttcgcgtgataggtggcgatgtatttgttgacggtcacccccaggccgaagtccgtcagggacagccacgcaatcacggaattgctgagcatgaaaattccgtattcattttctcccagactggacagggtaaacggggtcagaaagaactgcgtcgccagcctgacgatgatggatatgtaattaatgcaggcccccgtcttgatttcattcatgtggaatttatttcttgttggccagcaggttcccgagcaggtgcccgtaatttgatttgagggaaaagtaaagtatccgcggcaggttggcaagcgtcacatatttttttaaggcggaaaaagcttctttccgtatggccttttcccggtcggggtaaaggctttttattctatccgcaagaagtttatagttggcatagcaaagcctgaacaggaccaggaggctccggctccgctggaaatagttgctgctgtacggggaacgcccgtcaatgcagttgctcaggtccaggatggcgcgaagggcgttcatgtaatcctccagaggccttttccggttgaagaaattgctggtaacccctgtttccccgtcggcggaatattgataaaaaggcttgttgatgacggttacggagctgcaatggcagaaacattgcgccgtgaaataaagatcttccgcaaatttgacgttttccgggaatttaattttatttttaaccagaatttcctttttatatatcttggcccaacaggccggaatgttgttgttttccacaaacggtgttcccgcgtggaaaacagccgtggaatccggaggcaggggacggatggagggggacatgaagcccgtccattccgccgcgcaggaaacgaggcttgcgccgaagacgaccatgtccgctgcggtctcccgcatcgtttcatggcaggcctggagcgtttccgggaggagccggtcgtccgcgtccacaaacgccagatgcggggcatgcgccaggcttatccccaggttgcgcgccgcagacactccttcattccgcttgtggatgacgcggaagcgcgcgtccttccgggcgtattcatccagaatcgcgccgctgccgtccgtagagccgtcgtcaatgcagaggcattcccagtccgccagggtctggttcctgacggagtccaggcaggccgcaagctgcttttcattccggtacaccgggatgatgatgctgaacaggggggtgtgcgcgtccggggtcatgaagggaaagtcaggggggcggcgggttcaacggaaagggcgaggggggagtacatcttctttttgaggaacaggaacctgctccagcccagggcatcgcataatctggtgactcccaggcaggccgccagcaccagcgccacggacagggcggcaaagcagattctgctggaatcaaaggccagcaccggtaccagcggcttgcacaggagcgtgaaggcgggggaaaagatgacgatggacagggaattcctgcccaggtaggcgaacagttcccggatggccctgcctgcggaatcgcaggtttttaccagaaagctgagcgtgagcatgcagaggcagagccccagcatgctgtcccggccggggagggggaaaaggaggcagagcgcggcggcggggacagccgcccacagggtggggaagaagcatttcaggatggggagcccggtcatccggaagaaggtccccaggagaaagtaagcggcgtgaatcatttggaacgccggattgaaccaggagacggcggccaggagggcggcgcatacggccagccgggccggaggggacaggcggggaatgcgggagacggcgtagtaaacgggcaggcatacggccagcaggtagaggtaccagtacgttccggcgggggccagcagcagcgccttccagaaggcggggaacgccgggtccagccggttgctggcgggaacggaggcgggcagatgggacagggccaggtagtacagcgattcaaagaccaggtacggcgccagaatgcccagccacgttttcaggaactggcccggagtcttgccggtattggcgaagaagccggaaaggatgatgaagccggacatgtggaagacgtacacgtaccgcgtgacgtccaggtagtgcgtggagaaccaggacaggtggaaaaggaccatcagggtgatgagaattcccttgaggtagtccacttgcggaatccggcccctgccgggcgcggctgcgggcgggggaatggcgctgtcaatggctgcttgcatggctggaaaatgggcggcggaaaaaaacggttgagtggcgcatgaggcgttaaagatgccttgttttcagcaggagatgggccatgcggtacctgcgtgcggccagcaggcggcagaccaggtggaagtaggggccgcacaggcgcaggtcagctccgcgcgcggccagtccgctggagaggaagtcccggaacaccgccttgcgggcggcgtagggctgctgctggagggcgtggaagatcacgttgattttttgcaggatgtagcctttgaccacgggaacgtcttcctgcgggagggccagcgtatccgtccacgccaggaatttggctgccagcatgtctatgtcctgcacgaggttgaagcggctgcgcttggccgcgccgttttcctcctcccgcgcccggtagtggtagaaggcccttttcaccaggctgatgcccggagcgcaggcggagaggtagtccaggacgaactggaagtcctcaaacaccaccgcggaggcgttgaaccggatgccgtttttttccagaagctccgtgcggaacagtttgttgcaggaggattccatgtccagggaggtcagcaggtagcgcaggaaggcgcccgtttcttccgcgggaatgtactggtcccggctgggcagcgcggtttccgtgcgggtaaggcgacagcccgtgtggaagtccttgctgattccgtagcagtggagcgcggcttccggcgtgcggagggctgcgtcatgaaggcaggccagcatgtccggctccacggagtcgtccccgtccacgaaggcggtccaggttccccgcgcccgggaaaggcccgcgttgcgggcggcgctcacgccgcggttttcctggtggatggcggtgaagcgcgcgtccttccgggcgtattcgtccagaatggcgccgctcccgtccggagagccgtcattgatgcagatgcattcccagtccgtcatggcctggttcctgacggaatccaggcaatcccggagaaaggggccggaacggtaaacgggaatgatgatggaaaagaagggattcatggaaaagcgggaagaaatgggggtcagcgcgccgtcttgccggagccttttttctgtttctcaaattgccgggcgtccacgagggtcctgtaccaccaaccctgcatgaaatgccacaaaaatccttcccgtccgtccagaaaacccagcttgaggaagtagcggtagcagaagtaggcgaaggagcgccagaagagaggctgccgggcgtagcgttccttcatggcgcgcttcctttccgcctgcccgttgatgccggagtccgccgcagcggaggaaagaatgtcttccaggtcagccagctcccgggcggagtagtccacgtgcttgtgcgcccaccagcccagtccgttcaggttctcgtccacgaagtcgtgctcgaattccacggcgcgcccgcggctgagctccatgtgctcgtccatatggcgctgttcgcatctggccgctccgtaacggaacaggcgcagcagcttgacggggtaaacgccgtgcttcatccaccggcccaggaagatgtgcctgcgcttgtggatgactccggtgacgtccgggggaagggcgggtaatttttccttcagctcctccagggcttccggcatgaaccactcgtccgcgtccaggcgcagaacccaggcggtggtgatggggcagtggtccagcgcccagttgaattgcggggcgtagaggccgggccattcgtgctggatgacctgcacgcgggggtattcccggcagatggcggcggtgttgtccgtggaaaagcagtcgatgacgaaaacttctttggccgccgggaggatgttctccaggcagcggcggatgtgaagttcctcattcttggcaaggatgatgacggagaggtcgagcatggttcagcggagcgtgcgttgtttgatgaacttggccgggttccctcccaccaccgtccagggggccacgtccctgaagacggcgctgcgggctcccaccacggctcccgtgcctattgtcacccccatgcccacgaaggcctgcgccgccacccaggcccggtcttccacggtgatgggggcgcagataagggcgtggccggggtctgaaatgtcatgggaggccgtgcagaggaaggttccctgggagatgacggcgtggctgccgatggagatgggggccttgttgtagatttccgtatccgggccgatgcaggcgtattcccccatggagaggttccacggcgcccatatcctgctgctggggtacacgagggagacgagcggtatttttgccccgaacaggcgcagcagcagattccggggcaccttcatggcgttggtggccatcatccggaagagggtccggttgatgacgtaccagccgtaccgtttgaggcggtggctgagggagtagtgttcctggtaacgggacaggttcatggcgggaggatgtcgtttgaatggtgaaaggcgttcagggccgggaggccggagcggcggaaggttccgcgtctgttctcattccggtggagaaggggcgcagggggccgtccgcggattcccctgctttctggaaataggcggcccggaaggcggctccctctccgctgccccatagcggggcgttccagggatgctccgggtggtggaggtggccctcccacagacgctgcatgttggcaagccgcgcggattccgtgaaggcgagcgtgggcgcggccttggcgaagacggagaggctgggcagggccgccagcgccagatagcagacgcaccatgcgcgccacgggcgggtgcccaccggctccgcaaagatgcgggtgaaaaggagggccaggcagaagaagctgacgcttgaggccttgtagcagaactcattgtagccgcccacggaacctatgtaaatgaagtaggtgagggtcagaacggccagcgcggtccagaagaggtcgtcttttttaaaccggcggaacaggaggaccgccggagcgccgaccgtcagcagccaggacccggccagcgcgccccagaatttccagccgccgtgccggagcaggtcaaagggggagtcctcccaggtcaggcggatgcggttgttcccgttgctgctcgtgaagtagattccggccagcaggacgagcgcgccgcccgccagcaccgtccaggaggagaagtactgcctggcgggaatgcggcggaccagcgcgcggacggcaatgaagaccagcaggcccagcgaaccgatgggggaggccagcaggcacagggaggccaggaagagctggtgccgtggcggtatgtcccaggcaaccgccatggcgaggaacagccacagcagcgtggtgtggtggaaggtgtaatggagctgcatggtgggggccacgccgccgaagaaggccagcaccgtcaggtagagttcatgggccgtctgcccctgcgggttgaataaatgaacgctccatctgaccacgccgtccagcgggccctggaagatgagcaggaccaggaagagcagggtggccatgcggaatttgccccagaggaccgtgagcgccagcgccaggcccagttcaatccaggaggtcaggacatagtttacgatgaagacgtccgaccaggagaagcatttgcatatcagggccggaggcagccagaaggcgaggtagtagatgaagtgcctgccgtccgcttccgccagcggccagtcgcaccggatgagcgtttcgtaaatggggttgcggaccacgaagtccgcgtgctggagggccacccccgttattcctcccgccagcagccacaggagggaaagaagaagggcgcagaggtaaacggccagctgccgcctggtgaagtgaagcgtggggaccgggagcttcacgcacagcaggacggaagccgccgccacggccatggccgccggaacggagaacaggggcctgacccagcccagcaggaagaggatggtgggcagagccatataggccacggcgcaggaagccaggagcctgccgctgatggtgaacgctgtgtccgtgtttttccgtgtctgttccatgaggtggctgaatgaagttctgctagggggtgggcgtattattgcggaagacttcctcccactggcggacgacgtgttcccgcgtgaatttccggcttttggcggcggctgcccgcgccatggcgtccagggcggcgggggactgcatcagcccggcggccatgtcagccatctgccgcgcctggaacccgccggacgccggcaggatgcagccgttctgcccgtggtccaccaagtcatacgcggaagagaagctcccatagagaagaggcacggcgccgaaggacatgccctccaccacggcgagcggcagcccctcgtattccgaggccagaaggagcagggaggcctgttcgtaatacggggccgggttccggaagccctcaaaggagacgcgttccaggcggcgctccgcgcaaaatgcctgaagggcctccttttccgggccgtcccccaccagccggagggtccagtccgggaagcggggttccagcagggcccacgtttccagcacgcgggagactctcttctggttgggttccagccgccccacaaaaagaagctccttcttcttgaaggccggatcatagcggaattcccggttttccacggtgacggggttgggaatcgtcaggagtttcccggtattcttcagtccggtgatgttccggaaggcccggtggaagctgtcggaaaggaggatgtaacagtcgctatgggcataaacgtagcgcaggctggccccggtagccatggcgcagcctttcagcaggaggcgcaggaaggccctgtttaccggattccccgcccgggccatgcgcattctgaggccttccagccgtgcgttgcagtccggggcgttgtggtgcacggccagcaggcggcaggagaggccccgcatggccttccggcacagccgggtgacgtggaagggcaggcaccactggttgatgacgatgtcaatgcggcgggaggagaggaggtcccggagggcggcgagattggcgtggctagagacaggatagcccagccggtgcagggtgacgcggctgtccagcgcgggggagggcgtctccgtcacttgttcaaaggagaccacatgcacctcatggccccgtgcggagaattcattcgccagaatggcggtgacggtttccacgccgcctatggaggggaatttcccaagcagaaagaggaggttcatgaaaggtcgacgaattccggtttgggttcctgccccagcaggtaacggtacaggcgtttcatgctggcggccacctggggcgaggcgtaggtttccatgatgaggctgcgcccgcggtcccccatggcgcggctttcctccggcgtgaggttgaaggcttcttccagcgcggcggccagggaggcggggctgttgtcgcgccaccagccgcatcggctggtatccagctcctcccacggcgttcctttactggcgatgacgggcgttcccgccagcagcccttccgcaatgctcatgccgaagttttcctgatggctgggagcgcagaggacgttgagcgaggcgagcagttcgtatttctccctccccgcggcgaagcccgtgaagcggatgccggggccgcccacttccgccgccagccgtttcaactgcgctgcgtagtcctccgggccgtccccgatgagaaggagctccgcgtcccggaggttgaggctgccccaggcccggatgaggctttccagatttttaatggggtggaaacggcccaggaacccggcgcggaaacgctctccctctctccgccggatctggccaatccatgaaggcacggccaccggattggggatgaccgccacggggttggcaaagcccagttcgcgcaggtgccgcgcttcctcccggcaggtggcgtgaaggcagtccgcctgtgccaggtcccggcggtggcccagcgccagcatgagctttttcctccacggcttgatggccagggcctgcgggtaaagcatgccgtggggggagaccacgcagggcttgcatgtcttccgggcctccgcgcaggtggcgtggttgacgtccagccacaggccgttggtgtggtaaaggtcgtagtcccgccaggctctgagccggcggcgcagattcatggaaatgcccagaggggtgcggaggtcgttggggacggcgcggatgaaggagctttcctcttccgcgggactcccggccctgtcctccacggtgaggatgtccgtagcgcagccgaggtcgttcagggcctgcaccagttcgcgggtgcaggccgtggttcccccggactgggaggccatggaggcgatggtgtgcaggatcttcatgatgccgtttccttgagtggagcccagggagctgcggggcggttttcttcccggccttccgtataatgaacgatatggaccagatagcgggccgccgcggctccgctgatggtttgttccgcccacgcggcgatggtcttccgttccgcgggggagaggcggcccttgtccagccattcccgcagggcgcggcgcaggctttccggacggtccgggtcaaaggagccgccgcgctggcggccgtcaagcaggctggcggctccgcacgccgtggagcacagcaccctcatgccggactggagcgcctcattcaccacggcgccccacccgtcaaacaggctggggaggacgagcaggtcgcactgccgcatcaggcggcgcgtttcttcattccccagcgtgccgagcagggaaatctgcccgcagtcctccgtttccagggcggcctgttcccgcagcgggccgtcccccaccacgaggcagcggcggaaggcgccgcggcattgccgggccgcgcggaggaagggcaggaggttcttccgggggatgagctggcccacgaacaggagatcgggcttttccccgggagcggggggagccatggcgggagtttccacgccagccgcggatgcggctgattccgtgaaatagccccattcaaagacggagtccgccgggaatccggcgcggcggtagcattccacgcccagacgccccgtcgccagcagggccgcgatctttttcccgtaccgcaggcggagaaagcggtacttgacgctcctgagcaagccgcgccagccctggcggcggtagggttccgcgtacaccatggttttcaggccgcggcggacggcctgcttgaacgccgcgtaaaccatcgggtaggtgctgatgccggaaaagacgtggacggccgcgggatgggcgcgcagggtttcctccaccgtccgggcgtccggggagatgaggatgcgggcgttccccatgtccggcaccgtccagccgctggattccctctccccttcaaagtccgtctggactgccagcaggacgctgtgctcccgggccagcgccttgatgagggctgactggtggatgctgatcatgttttgccagaagacgaattgcatggtgttattttcctccattgggcaggttgcggtacgcatgggcccccccgatgacggcccagaagacggcggaaagtccggaaccggctgcaaagacgtacccttccgcaatcatgtggacggcgaagagggccagggccgcctgcgccggggaaacgggcggagagcccggcgcgcggaacgggcgtttgagcaggttgccgaacaggatgaagaggaagggaattccccccagcaggcctgtcatggcgaacacggccccgtaggacgtgcccggttcaatgatgccggtcaccagggattgcttgaatgaaatgattttctgtgaggcgaaccccacgccgtacaggggggaggaaaggaactccgtcgcgcggtcttcccacaactgggtgcgggaggacatggcgctccccatgctcaggttggcctgctgcttggcaagcgtgttggcgccgaagtgctggacaaagggcaccagcaggatgcccaggaagaacagggcgagcagcacccggaaaagctttttgggggcatgcctgaagtacatgaagaagacgtaccccacccccatcagggtggctaccagggcggagcgggaggcggaaagcaggatggagcccaggcacgcgaccatcaggcccaggcggagcttggtctccttcctgccggaataccggttttccagatggaggacggtcagataaaccagccccagcccggcgagcaggcccagcgtgatggattgccagaccagccccccgaagaggcccgccacattgatcatctcactggtattgtagcgcatgtagttgatgcccaggaagtagccgatgaaggagccggccccgatgaagacgcagaagcgcatgagccagaggaacaggttcaggcggaacgcgttcaacaggcgggaggaagtcagcggggtaagcgccagcaggaggagaaggaaataggccaggcggtaccagggcttgaaaatggcgggcggatggttgaacgccaggctgaggacgcatgccgccgccatgatgaccaggggcatgctggtcttcttcattttcgtcacgcacgccgcggcggccaccgccagcatcaccggatacaggggggcaagaaaggagatggcgcccgtcatggtggaggcgatcgccgccattaccaggaatgaccaggttccgtgtttcttgatgtattgcagaagggatgccatgctgttcaggggaaattcatgcggacggggaaggcgttcctatccggtagcccaggcgttccagctgcgggagcagggaggctatccgcgcttcccagggagcgtgctcgcaggccgcccggtagtttttatccaccaggtcctgataggaggaaatgttcgttaaaaggttcgtgatttgttcatgggcgttccgttcgcttatttcaacgacgggattgtaccccagcaggttgaccagttcctgcggggccctgcctgccgggagcgtgcgggacagcatgcattcccagtagcgctgggtcagggtttccacctctccggccatggccgggtgcgtatcgcagcgggggtaggagacggtgatttttgcggaggccagcccctcgcagagggagcggaagtccgggaacaggaggagaccctccgcggcggggaacagatggacccattcgggatgttcccggcaggcccggacggcggcgcggtggaagaagggcatctgcctgccgagctccagaatatcggcgggcctttcccggaggtccttcccgggcaggtagcccgccgggtcaatgccttccggaacgtggacggtccggatacggggcagttccttccggacgtgttcgcagacctgggaggaggtgcacaggaaggtgcggacgcggtggcgcttcagggaggagatgaggcgcggccagtaccgcggccagacgtcccacagcatggggatgatttcatgcgtgtaggcatgcggccatgcgaaggagtccggatagcccgcgccggggaccagcagggcgttccggcgggaggaaagaagaggcaggttggcggacagcttcagccgggccacggccagcagcgcgggccagggaagggggcgcctgcgcttgatgccgcccccgcaggcctgccacgcccgggcaaaccagtccatgaagaactggtggttcccctttttgcggacaggttccagcagaagaagctttttcatgggttcacctccttgagcatgccgttccattcgcggataatccgttccagcgtgaaaaattgttcctgcgcgcgcgccttccgcgcgtacggggccaggtcctccccggccatggcgcgcatggcgccgcacagggcgcggctgtccccggcggggaacaggcgccccgctccgctgtcccgtatgagttcccggcagatggggatgtctgcggcgatgacggggaggccgcagctcatggcctcaatctgcacgaggccgaagccctcgcaccgggaggggaagagcagaatggcgtgtttggggtattcccgctccatggctgtgtggctgccgtgcaggcgaacgcgggattgcaggccgtgttcccggatgaattcctccatccacgggcgcagggggccgtctccgtacacgtgcaggttccattccccgttattcctgctgaattccccgaatgcctccagggccaggtccgcccccttgtgggaggacagggagcccgcgaagacgaacgtttttgacgtcaacgcggaatgccgttccgccgtgaagctggccgggttgtagatgcgccgcgttgccaggtgctggcgcgtttcaaagttccgcctgtcgtggtccgacaggacgacgatttggtcgaagcggtggtagaaccgcttgagcgcatggcggaagtaacgggagaaatggggccccttgaacccgaagtagtcttcataggccgcgtgggaccaggagatgattctggtgcggggggaaagctgcggccggagcagggcgagcagcagggagtcctcaaagccggacccgaagacgacggcgtcatattggtggcggttgatgtggctggtgaggcgctttttaaaggaatgcgtgtaccgcaggaaagcgtacgcgcgggcgcctgcggaggaggagaacagaggggtccgggtgacgagcctgtccatcacggaacgcctcattttctcgtaaacgttcatttcatggtggaaaaagcggatgttctccaggtccagcccgtacgcgttttccagcggtggacgccgcaggcagtacacgctgatttcatgctcccggcacagcgcgttcatgatgcgcgtcaggacgcgggagactccccccacgccgaaacgttcccaggcgatgaaacagatattcatgagtaaacggaaagggttcggttcatctgggcttttccgccagcgtggagagaaggttttcccacagtccggcgatgcgggatttgccgaatttcccgctgctccggaagcacgccgcggacatggcttccctcttccctccgtccctcatcaggtccaggagacgggcggcgtactgcgccaggtcaaagggagggaccaggattccggtccggtccggttcaatgatgtcccgcacggcggtaaaggattcaaaggccatcgggatgcagccgtgctgcatgccttcaatcaggaccatgccgaagccctcaaaggtggacgtcatgcacaggattccggctttgcggtagtattcttccggatggtccgtggctccttcaaaggaatagttggtgcagccgcattcctccgccagcgcggccaggtattcccggtccggtccgtcccccacgatgcgcaggaaccagccgggttcccggcgacagaccatgctccatattttcagcaggcggtccacccccttcactggattgtccagcctccccacgaacaggacttccctggcctttccggaagggatgctcccgttctcaaaggaattcatgttggggatggcggtgattttttccttccggactcccggcagaaagtcgtaaaagtcctgtttgaaggactctgacaggacgacgaaggcgtccgcctgcgaaatgcggagatagaaattcctgcgccacgtgacgttgtaatacatccttttcaggaaaggcgcgcggaggcggccgcggatgtccgagtggtgcatgtcgacaatggcgggagttttcccggaaaaggcttccagaaggcgcttcctgcctgccggaccggggaacagggctcccgcccccagcagttccccgtcatgaatgatgatatccggctgccgttcctccagggcctgcctgaaagccgcctgccgctcctcccttatccgggaggaaggagtgggcaggattttctgaatcccggaaaagggctcgtagggggtgttccggtaccagctcacgatggtgcattcatgcccatgggcctgcaattcatgaatcagattgcacatggtgcgctccaccccgccgcaggatggattgagcgtgcccatgaaacaaaagagaatcttcattgaaaggtggacggttagtgctgaagcagggagttccattcccgcacgacgttcgccggggagaaaagggcggcatgctgcgggcctgcctgcgccatggcggagcggaggggggcgtcctgcatcaggcggaggagctggcgcgcgtattcctcctcgtcaaaggggggggccaggatgcccgtctttccggggatgacgaggtcgcgcacggcggcgtagctgttgaaggccatgggaacgcagccgtgctgcatggcttccggcagaaccagcccgaagccctcaaacgtggaggtcatgcagaagatggaggcccgccggtaatagggggtcgggttccggaagccttcaaaggaaacgttggaaagtcgcaggcgttccgccagttctttcagggcggcggcgtccgggccgtctcccacaatgtccaggtgccagtccggcagggattttccggcgcgcgcccatatcctcagcagtctgtccacgcccttgacggagttgttcagcctgccgacgaagaggacgcgttgttccttttcctgcggcaggggaggcgcttcaatcggcgggacggggttgggaatggccgccagtttttccgcaggcgtgccgggagccagcagccggaattcctccatgccgccgcgggaaagagtgacgatgcggtcataattggccgccagttcccggaacaggcttttttgcagccgccgcgcccggagccgcttgacggggagcgccagtgcgttgaacaggaagtccctgcattttccggagaaggaggcggcgccccggcgcttgtggacaagatggtaataacgcagggcggagtattgggagctgtgctgcacggcgaccagcttcacgggagcctcctccatctgggtgcgcgtgcggaagatgccccagcggcccgtgacgcccccctccgtctggtcaataagcacgtccgtcttttcctcccgcagcagtttgagcaggtagtccctctctccgctgcgggaaaggccggaaggaaggaaggcgaggggtacgggcgcaaagtacgtttcccccagcctgtttttctcacggcagagcagcagaaccctgtgtccggcgtcccgcagcatttcagccaggccatgggtggcgcgctccatgccgccctgcttgcccataggctcgtaagggagatagatgacgatgttgctcatggttattcttgcaggcattccatccagaggggaatcactttttccggttgataattggttaataccctggtgctgggcggcacgtaggggccgctcatcagctcatccagctcccgggcgaagaggcgcaggctgaagggcggaatgagccgccccgtctcccggtccggcagcatatcttcagcagcgtggaagctgttgaaagcgatgggggtgcagccgtaggaaagggcctcgttaatcaccatgggcatgccttcgtgcgtggaggtgaggcagagtatccgtgccttccggtagtagggcgcggggtcctgcactccttcaaaatggacgttttccaggttcagccgtgccgccagccgttccaggttgccgcgttccgggccgtccccgaccaggtacaggcgccagtccggatgcaggggctgcacccttttccagaccttcagcaggcggtccgccttcttgggggaatccaccagcctccccacgtaaagaacggcattttccttcccggaaaggccgggctgcacgggatcataggtcagcaggttggggatggcgtacaggcgcgccctttccggtgcgcccgccagttgaagggcgtcttccgtgtagcggggggaaaggaacaccaccttgtccgagccgcggaacatgtccctgtatttcctcctcttgttgctgacggccacatgctttttgtacggcaggagcgcccggcgcagcagcgttttcacggtgttgccccaggtgctgaaatccttccggagcagagcggaaaagtaatccagcccggtatggacgtcaaaggagatccaggagacgatggacgcctggacggaaaggcgctcatggctgaaaaagaaggagtcgtcctggttggccccgcagttgatgatgcagtccgtctgctgcccggcgcacagggtttccacgtactccctgttttccgcgcaggagagcgtgcctgtgcggggaaggaggaaataaggcggttccgcaggcagtgaatccgagccccggagggacaggaaggaaacccggtggccgtgccgtgacagggcctgcgccagaagatacgccgcccgttccgttccgcccgcatggggcaggatgggatggtcaaaatagaagagcaggttcatggcggcggaacgggaaggcaaatgggacagtgaaaggggatattaccgggtttggaaaaagtagcggacgggattgcccgtggtgcccgccttggacagcagccgggtgacgccgtagtgccacgggcacggaaggctgtttttcctgaaggcctgcctgttctggcgcgtattgcgcaggatggcccgcaatcccgccgtgctggaaccgccggtgcgcatgaagaccatgttgcggtcgatataggctgtggagatgcggttcttttcaataaagcggagcatcagctcaaaatccgccgcgctgccgatggaggggtcaaagccgccatagcgggtgaagcagtcctttttgcagtagaacgtggggtgcgccgggcaccatccgcgttggaaggagccgggcttgtagtccgttccgcgccatgtccggacgactttccgggccgcattgatgtaatgcaggttgccgtggacggcgtccgtcccgtgctgcgcgaaggctccggcaatggtttccagaacgccgttgtcctggtaatagtcgtccgcgttcagaaagccgacgacgtctccggagctcatgcggacacccttgttcatggcgtcgtaaatgccgttgtccggttcggaaatccatttcagccgcccgtggaagcgctcttcaacatcctgaagcatttccagggtgccgtccgtgctgccgccgtccacgactaggtattcatagccggtccaggactgcgccagcacgctttccagggtgtcctggagagtggcggcgctgttgcggcaaacggtgatgacggtgattttcatggcggcggatgcagggaaaaagcgggcgtcccgcccttcccggcggggaaggtgttacaggcggagtttggtgagcatgttggcattgtgggcgtctgttccccaccacaggtacaggttttccttctggaatttccgggcggccgcctggcaggatttcccgtaaagcccgaacagggagcctatgttcccctggaagctgattccctgtgaggccagggcagccagttcctccggaggcatgatcttcccgtagcgttccgggtgggccaggacgggaacgaagcctttctcctggaccagttggagcctgtccctccaggcgctgggaaggcggaactggggaagctccacgagcaggtggctgccgtcgtggctgagcggctcttcctcctcaagcgcctgttcaaaatggtggtccagcatgtattccgccgccaggcgcaggtcgaaatcccggtccggcagggcatccagaagctgctggaagcgggctttcaggcgggcgggcgtgttggagggatagcggctgctgatgtggggggtgcaataggctcccctgaatcctttttctttcaatcgggaaatgatttccagactgtcccggagggtgtgcgctccgtcgtccacgccccacagcaaatggcagtgcatgtccattccgtccggacagagcgcagcggttttaagcctgggttgaaagagggaggaaaacaaggccgggaatcaggaggggttgttcttggaggtgttgccgtagtggtagccgtagccgtaatagctgtagctgctggatttgaaatccacggcgttgatgacgaagcccatgttgggaagctggccggattccgcaagctgctggacggtggcgatgtgccgcttgtctatcctgttgctgcggatgacgtatagggaaatatccgcgtggctggcgaggatggccgtgtctgccaggatgccgtacggcggggagtcaatgatgacggcgtcatagcgttccttgaagaggcggatgagctcctccatttccggcagggaaaggagagtgaccgggttgggaacctggggcccggcgtacaggatgtccactccgggatgttccggtagggtgcggatgacggagaacgggtcttccaccttgcggagaaggatggtgctcagccccttgcggcccttgccgtcaagctgcttggacagggacgccttgcgcaggtccccgtcaatgaccaggacgcgcttgccgatgttggcaaaggacatggcgaggttggcggagatgaacgttttcccttccccctgcatggtggaggtgaggaggatgacgtgcccctggttccgggtgacggggagcatggagtccgcattgtggcacagaatctggaaatactcagaaatgacggagtgttcatccgtgaacatgcgggccacctgccgctgctccttcttggtcatggccggaagctccgcgaccacgggaaggtgcgtgacggcgttcagatccttcctgttctttatcttgttgttgagcagggccagccccaggaagccgaggatgcagacgatggcgccccccgccgccgcggtcagcacggattttctggtgttgggggagatggggtagtccgtgccgtgggcggattccagcacgcgcgcggaggattccgtcagggccagcgtcaggtcgttttccagctccttgcttaaaagcgtcaggtaaagttcctccttcacccggtgttcacggtccaggggggtcagctcccgggcctttccggaggtggccgtcagccgtttggcgatgtcctgcctcttcctggtgagttcctggagtttcagctccagattgttgcggagattgtccagggacctggacgccgcgctgcgggtggcgtccatcctcttcgtgagggtgacgacaatggggttctgccccccggcgcttccggcgaccttctggtattccaggtaggcggcgttgtaggcttcaatctgccgggaaaccccggaatccgcaatgccggtatccagggaaatgaggcccgccttgtggcccagggcgtccaggttttccttcaggccgtccgccagcttcatctgcgtctggagctcaaagatggaattgtccagggtctgggccgcgttgaagtctgcggagatggacgcttccgtgtctgcgatgatgtcgtttttgattttgatatcatccattttctggtccacttctttcaggtccgcgccgatctggccgcgctgccgccggatgaaatccttcgtcttcaccgccttcgtgcggcgttcctccgtggagtggtcattgtaaaccgcgatcagcttgttcagcgtgtccgcggccttgtccggattggtggaggtcagcgtcatttgcaggatgctggattccttggcgtccggacgcgtgaccgtaaaattggcaaggagctggtccgcagcggcgttcacgggaatgcggcgcacggtgatggtggtcccggaaacggtttccggcatgttggaggtggggtaaaccgtgacggtggcgaaggggagggaaatgggggcgtggagcttccctttctcctggatggggttgccggcggcgtcatggtacgtcagcgtcacggcgttttccggctccagcgtaacgtcaaaggagcagaagcggttctccgcgatgtcgtcaaacgtcacggtgatggggctgtccttgtacaggtctatttggcgcaggtcctgctgcttccagtaggagacgttcagcgtcaggtcctccaccgtgttccgcatcactgtgcttgagcggaggatgaagctttcattggccaggttggcggctccggaatccatgcccagttccaccttgatgcggtccgaggaggaggaatccttgttggattcccgcatgatgacgctggccgttttttcaaaaatgtaattctgcttgccggtcacgtaataggctccggcgcctccgagaagggcgaagagcaaaatccagtaccagcgtctcagaaggatgctggtgatgacatccagtgacagggaagattccggttcctcggcgggaggggctgcggggggagcaggagtatctggcataaaaaggaatcaatcaaagaaggctccgcctttccggaggacggaaaggcgggaaatggggggatgtgcgcttacagggcgcacagggcaacgatgccgataatcaggccgaggccggaagccgtccagccgatgtattggacggtatcgctgcgggtgttgatcttgcgttcggcaggcgtcacgtaaatggtgtcgttctgctgaatgtaataatagggggactggaagaggtccttgctgcggaggtccacggtggcgatctggcggcgtccgttggtttcacggatcagggtgatgtcccggttgccgtcgatgttcaggtctccggcgcggctgagggcttccagaatcgtcaggcgctggccgtccacgttgtaggtgcccggggaggctacttcacccaggacggagaacttgaagttggtgatctggacgttgacggaggcgtcgctgatgtagtctctgttccgcagggtggcggcaatttcatcccccagccgggagcaggtcttgccggccgccttgatctttccgatgaccggcaggacgatgtagccgttggcgtccaccaggtaacccttccgtgagctggtgccctggctgctggaccctatttcggagacggcaaacggagcggccagttcaggctgcttgctgctgacggtgatggataactggtcgtccttctggatgacggtctggtaattccccttgatcttttcattggtctgtccggagacgtcctggatatacaggacttccttggggctgacgcaggagggcaggagagaggaagcggccagcgctgcggagcagagggcggctttgctgattaggttgttgatgttcattggttggagagaggttggatggaggtattcagaatgatcttctgggaagggggggaggagggcagggaaaggtcgttatgaacgagggtctgccccagcttgctctggaacgcctcgttgcactgctggattccttcacggatgacgaccgtgcgggccgtctggaaaaggagggagaggtccattctcagattgacgttctggacgtagatcaggtcatagcaaaggcggcggcagaaggggatgccgttgcggccatggatctgggccatgccggtgatgccgggacgcacggagcagcgcttccggcagtagttgggcgggaatcccgccatctgggtggggatccagggacgggggcccacaaaagccatgtcacccttcaggatgttgatgagctggggaagttcgtccagggaggagctgcggaggaagcgccccagcgggaacagcctctgctcatcgggcaggagcttcccgttttcatccttccggtcgttcatcgttttgaatttgatgatcttgaacagtcttcccctgtaccctacgcgcgtttgaagaaaaaacggggatttccctgtagaaagtacaagaagtaccgaaacggtcagcagcagcggaatgaggatgatgagagctattccggcaaggaggcttccaagaaacggtttgcagatatgtatgtacataagcgccgcggcagaattagcggattgcaaatccgatgtcaatagtaatcattaaagaaaaaatacttatttatcattcccgcgccttaaaaaactaaaaaaatttaactcaaactattgtttgctgtatataagtatatgtaatgaagtatgttatgatagaatttatcgtaccctattattttgataggatttgcaatccgctggatattttattacaggtgcccaagtattgaataacatgtctttttataatagaaatatggttgaattagtgtaatcaataagataggaagggcgaattggttattgctgtatttgtgttggtttgaaggggaatgaagccgtttgcgcaggtaagggaaggactatgcatgacgctgtttggtggggtccggaaaggaggctcttccgggtttttccttcctgaaatctgtcatttccaccgtaatcgggagaaacctgcggccttccggaccccctccttttgtttagccttgagttgggggcgcggagttgttaggataaaaggcaggtatggcattggatgtgcaggagcatcatgcatttgagcgtgaagaggggcgtccccctgtttggataggaatggcgtggggcgtcgtgtccctgctgggcggggctgcgctgcttgcggccatgctgacgtttgacgtgcgggaaataggctggagttatttaaatgattccgggcaggtgattccgggcacctccaatgtgctgggcgtggcgggattgtacggcgcggggattctttattgggcgctgggcggcatggcctggatgctggtcattctgttggaatggtgggggctttaccgtctgctgcaccgtgaaagtcttccccgcagcgtggtgtacggcggccttttcctgctgttgttcggctgcctgttcctgacggccgggcatgtgccgggtgacgcatgggtggcgcgccaccagattcagggcgccggcggcctggcgggacatctgctgggaacggggttgcttcttccgttgaccggcacgtccgccgtgctggttctttccgggctgggctatctgctggccctggtttatgccgcgggaatgcatccccgcccgctgttccgcgccatgctgcgggagtggcgcgcctggcgcatgaacaggaaggagaaaagaatggcgcgccagtccgcgcagcttgccagggaggcggcgcgcgtgagggccagcatggaagatgcggccctttccgcccccaggccggccggaaagggcagggcatcctctccccgcctgcagcgcaccggggacgacttggaaggcttatataatgaagtggccgcggcttcccccgccaagtccgcagaccccgcccgccccccgcgcaccgcgtacgcaggggcatcttccgctgacgccgcgccccaggattaccgtggcgaagccggcggaaatcaagcccgctcccagggagcagcctttctccaaactgtccacgccgcctacggaggaattccgggattacgagcttcctccgtttgagctgctgcattatgaagaaaagccggaaggccctacggaagaagacaaggatgaaatgctggaaatccagcagaagatcattgataccctgacgacgttccgcgtggacgtgacgccgggggacattacccgcggcccgaccatcacccgctatgaagtttaccccgcgcgcggcgtgcgcgtgaacacctttgaccagtatgcgaaggacatcgcgctggcgacgaaggcggagagcgtgaacatcgtggcgcccattccgggcaaggacacggtgggcattgaaatcgtcaaccgcaacaaggtggccgtgccattgcgggaactcttgcaggaccccggcttctgctcccccaagaagaaaataccgctggccctgggaaaggacgtgtatggccgcaccgtgatcggggacctggcatccatgccgcacctgctggtggccggggccaccgggtccggcaaatccgtgtgcatcaacagcattatctcctccatgcttctgaaatcccggccggatgaactcaggctcatcctggtggacccgaaggtggtggaaatgcagccttattccaagctgccgcacctgattgtgccggtggtgacggaccccaagaaagtgcccaatgccctgcgctggtgcgtgaatgaaatggagcaccgctaccactgctttgccaaggtgggcgtgcgcaactttgaagccttcaacaagcggccgccggacgcgcctgcggaagaggcggaggaaccggaagacggggaggtggatgaagccctggcggaatccattgcccgtgacctggaatcccagggggaatggcccgcggaagaggatgatgaactggacctggaggacgacggcgtcatccctgaacgcttcccctacatcgtcatcatcattgacgaacttgcggacctgatgcagacggtgggcgcggacattgaaacgaacatcggccgcctgacccagaaagcccgcgccgcgggcatccacctcattgtggcgacgcagacgcccagaaggcaggtggtgacggggacgatcaaggccaatattcccacgcgcatcgccttccaggtggccagcggcacggacagccgcgtgattctggacaggcagggcgcggaaaaactggtgggcaagggcgatctgctgtacctgccgccgggttccgcccaggtggagcgggcgcagggcgcctttatctccgacgacgaagtggaagccctggtggcccactgcgcctcccaggccaggcagaaattccatgaagaggttcagaaatccctggacgaaccctcccgcggaggggcggacagcccgctggacgacgcggaggaggaatgctacgccaaatgcctggaagtggctgtcattgagcgcaaggtgagcacctccctgttgcagcggcgtttgagcatcgggtacggacgcgcggcgcgcatgatggatttgctggaatcccgcggcatcattgccccggcggacaataccaaccgtccgcgcaaggtgctggtggaatgaaacgacgagaaaagcccctccccatgaaacgaatcctttccctgcctgctctggcggcgttcgcgctgctgggcgcctcctgctcccagcaggtgcggcccgtcaaaaaaaacgtccggcctcccgtgtacgtggggaaggtggagcaggtgtaccccagccacaactatgtgctcattgcgctggccgggaacgtttacgagccgggaaccgtgctcatttcccagtctccgggcagggaggaaaaccgcagggtcgcgaacctgatcgtgacggaggaacgtatgggccgggcgcgcattccggcggacatacgcagcggagccgtggaggcaggggacctggtgttcctgtaccggaacctggccgctccggaaagctccggaaaaaaggataacccggacccggacaatccggaaccgaagacggatgaagacggcaaggaggtcaccccgccgatttccccggacggcggcaaaacgccggacggcctgctgccggtgcccggggaggcccctgcgccggatcccgcggaccaggagcgcatttcccgtgagcgggagaaaatcctccgggagctggaaagcgttccgggcaagctggatgacccgtggcgcgaggctttttccggaaaatcggcaggaaaatgattttttagattcattcaataaaagcttgtttttcggcaagtccccattaggataatcccgcttacgcaaccagatgactaatttatgaaatccatcaaaggaacagaaacagaaaagaaccttctcaaggcttttgccggagaatccgaagcgcgcaaccgctacacctactttgccggcgtggccaagaaagccggttatgagcagattgccgccatcttcctggaaaccgccgacaatgaaaaggaacatgccaaggtgttcttcaagctgttgaaggacgcctgcgttgaagtaacgcacaccgtttgcacggcccccctggaatccacggaggaatgcctgctggccgccgctgccggcgagcgcgacgaatggtccgaaatgtaccccacgtttgccgaggtggctgaccgtgaaggcttccccgccattgcggaaaccttccgccagattgccactgtggaacagcaccatgaggcacgctacctcaagctggctgaaaacgtgcgcgaaggcaaggtattcgccaaggaaaaggaaatccagtggaagtgccgcaactgcggttacgtgcacaccggctccaccgcccccaaggtgtgcccggcctgcgtgcatccccaggcgttctttgaagaactggcggacaacttctaatcgtcctttctccagaaacatgattggggccggtttcacgagctgatcgtgtgatcggccctctttttacctacggacgccttacgctgatggacaggaaacacacggatgcggtgtggatgaaatatgggcgcagcctctggaaattcgccggaagctacgggctgggcatcgccctgatgctgatcctgctggtgctgacgtttgccggaacgctgcatcaggtgcggctgtcttcctccatggggccggaggcggccatagaatccttcttcggcgcgccgtatgtgctgataccgctgggcggggaaaactccctggtttccctgccgctgcccggcatgggcattacctgcgccctgctgtttgccaacctgctcataggcgggatgttccgcgtccggtggacctggaggcacgcgggcgtgctggtggcccatggcggcattctgctgctgctggccggcatcatgctgggcaataaaatgacggtggccgtggaccaggtggaactgccccagggcgaccgggtgcacgagcagtccctgccgtttgacctgcgcctgaaccgcttcgtgccggaattttatcccggcacctccaagcccaaatcctatgaatcccaggtaaccgtctttccggaatccggcggccagtatgatgccgtcatccgcatgaacgagcctctccgcctttccggctggacgctgtaccagatgagctgggggcaggactccctgcatccgggcaggctcatctccatcctccgcgcttcccacaatcccctggagcaaatgcccaaatggtcttcctacatcattgccgcgggactgctgtggcactttgcctgcgtcttcggaaggtacctgcgccgcaaacccggccacgctcccgccggagcggaagcggcggacgaccatctggagccgcccgctcccggcggcaagcgccgcctgcgcctgataggcatttgcgtgctggtggcggcaatcttcggcgtcggcatgctggcggcccggcctgcctctcatccggtccgggtggagcattacgtgccctggtcctccttcctggtggaacgggccggggcaatggctgtccaggacggcggccgcctgaagcccgtttccacgtatgcgggcttccatctgctccggaccctgggcaaaagaagctttgccatggagacgccggaggggaaaaggaaactctctccggtggaatggatgctggactgcatgttccgcccggaattcgcggaacaataccccgttttcctggttaaccgggaggaagtggtcaggcgtctgcacctgccggaccaagcggacaagcggaaaaaatactcctatgcccagattgcggaacactgggaggaaatgacccgcgccgtccgggaaatccggctgctgggagaaacggatttgacggaagcccagaaggaaatcctggccctttcccgcaactttgacgtggtgcgcggctggatgctcggctcccggatcatgctggaagacccctccgccatggaacggatggaattcccccgctggttcccctctgcgggccagcacggggagcgtctctggacggccgccccggacaaagccaccggagcctttctggcaatggcctccctgctggaacgcaaggccatcggcatggaaggcgcggaagcctccggactgcggatgaaggcggaaggactgctgctggaaaaactggcgcagcccaatgaagccgcctccgccggggaacggcacagcctggaaagggaaatcttctactaccgcctggacccgctctatgcctccctggccgtctttgtggcggcgttcgtgtgcctgctgctctgcgccctcttccgtcctgccgccaacgctcccctctggcgccgttttctgcggcccggcgggttcagccctgcgtggctgctgggtgcggcggggaccggcgtgctggcggcggccctggtcatccgcgtgctcatcaccatgaggtccccggtgggcaacacgtatgaaaccattgccttcatcgcgtgcatgggcgtgctctgcgcgctggtggcggagctgttcagcaaaaagggcatcgtgctggcggcggggcttctgctgggggccttctcctgccagatgggcattttgtacgaatcctcccaggccgtggaccacatggaccccctggtagccatcctgcgctccaacttcctgctctccacccatgtcatcaccattgtgctggggtacgcggccgggttgctggcggcggtgctctcccatgtgtacctgctggcctcccccctgcgcctgatcggcaggaaaacggaacaatccctggaccgcatggcttacggcatcctgtgcttctccctggtattcacgctggtgggaacggtcttcggcggcatctggggcaatgaatcctgggggcgcttctggggctgggatcccaaggaaaacggggccctgatgattgtgctgtggcaattgaccgtgctgcacgcgcggaaagccgggtggctgtccccctggctgctccacttcagcaacgtggtgggcggcgtcatcatcgcctttgcctggtggggcgtcaacatgctgggcgtgggcctgcactcctacggcttcacctccggccgtgacgccctggacattttctactggtctgaagccgttctgtgcgtcctcttcatcatcctgcactaccgcgcgctccggcgcgtggacatcaggtagggggggaaggacgcatttttctcattttctccttgccgatccgggttccccggtatatattcccgccacctcatgcacggatagctcagtggtagagcggctgtcttacacacagttggtcgggggttcgaatccctctccgtgtaccaaagactttcttttataaaaattaaataaaaaagccgcgctctgaatgcgcggcttttttattgttattaaagcatgatataattaattatttaatgctggacaagaagtgtaatggaagaagtatagtgcttttttaataccagtggtaggaattatgttagcagctgatgcaatggtatgcagttgagatttaaaaattgttgtattttgtttattataagttttttatgatttttaaaaattccggaagctgcaaaatttagaaggcaaatttctccggaaatatttttcttgaggaatgaaatttaaaaacacgcaaaatgaataaaattgtgttcatgtaaaagttggttgtttctcttgccgtatctgattttagtgattgtgaatggagtttgaatttattgctgatctgtttgatggaatcaaacataaaacacgttagttttaatataaatattaattcaggtaataagaaatcttctatagaggataaataaataatacaacaaattttcgaggcgtgaccggactcagaaaaaaatgatcatcagggcccaccaggtttcattaggtgttacgccagatacctcccccgacaaccatctggaatatatgtgcaggtatctcaaactgatgaacaggagtaaaaaaaagcgctggttccacagtgaaaaaaactctgcgatcgttttcctatccaagaggtgcggcataggaaattgaaaatcagccagacggttttcgttgaaagaattatattaacggctcagttctctgcttcgttagcccccattgatcaagggcgtcatcaagggaatcaaaggaactgtaccccagttcttcgttcttcatggtcttactaattaccagatgtccccagtcaacaatataacgcgttccgttctgatctacgtaatccccggtttctcccggtacggctttgcaccataccttttccaactgccggattttggctttggacgtagacgttccattccattgaaccgtaacagtccacccgcggtgcgtggctccttctatggctgcaagaagctcgggagccgatttatgatccacatggactccaatggtcaattcccacgttgctccagttatcccgtcagcggacatccgcaagctattgatgatactcaatgcggtaggaagatccaattgcgtcgcatgaaacgcattccctccggcgactatttccggcagggtcaaataggcatacaggccatttccttcggcatccaatgcctgctccaggccactctcataaatgctctgtccatttgcatcaaccggatagcggcatgttttcaaattgaaattccaactcataaaattggtggcgtacatggccttcggtaatgcggagccgaattccaccatagatttgttggacataaacgcgttgttgacattagttacattttttagattgtgcttaaaatcaaccagacccgcgccctccgccatgtaggacaaggacgttacattgccaaagtccatatgaatgcggcggcatttggcagcaccgtaaatcaatgtatcgcatgaggtaatatttgttgacgatatcgtcacctcatcaacgtcagattgtctaaacatcccagtgcatattgttaaattagggaatctccatgatgacgggaagcgggtcagcttggagagagtgaaaagattagttccatttgtcaatgcggtcagggctgctggctccggcatatcatctggcaaggcggtaataattgtgccatcgcaaaaatcccgtataatattttcccgtgtccactcatactggtaggcgtaataatacgcagctgccttgtagagggagggcaggacatcagcaggtatctgcacggcgccgagtgttacaggccccccaatgttaatgccgccgttggcattataggttcccgttgtcgtcaggcttcctgcaagcgtcatattgccgctctcatccaagtggggagcggtattccatcggttgcgctcctcttccgtgatatggactgacgcgtccgctttgtgggcatcgaatgtttccgtgcttactttggaattaacttcagatgcttcagccttggagttccaggccgttcgttcatcctctgtgatgtgaacggaattatttttttcatgctcataaaaatcattatgggccgtcagtaaaattccgttgatggaggtaattttatccatgatttttgtttattattggttgtagtgaggtagttgaacaactttggcgcctccttatccatgatgaactccggctcatccggcatggaaggcttgcaccttccacgcgggctggcttcttcaacggtcagggcaactctggacgggattcataagaacctccccttccttcggttgcggatgggctgaaatttgatccagcggcgccctggcttgaagtgccttacattccccggataaaatggaaacggttgaaacccacttcggaaaaaatctacggctgtcccggagaaaggtcatcccgcatgggacgttaagactgcatgaatgctgcttttgcctggagcatcatttggacgtctgccgttatggataaaaaagctgccgcacctttcggtgcggcagcccctgtttaatgatgtattgaatcggttcctgaatgggaatgaatcaggcgccgaaatccagcgccttgggttcgcgggcccagacgcggtgttgtttcatggccgtgatgaaaggtttcatcagggccttggtgtctttcggcgtgagtagcccggcgtcgtccatatcccggggcaggtccgttgcttccagcatttcactggcgtcgccgggcaggccgatggccttcaggtgccggtatgcctggcgcaggtggtacttggcgtctccgttcatcaggagcgttttaatgctctgctctccttccggcacgatgacggcgtcaaacacgacggaggggttgccggacagggtgccgtccacaagcaggtctttcccttcctccgtattcacgcttcccatgtgcggggcaagaatctgggggtgcacgccttccttgtgcagggcgctgcagatttcctccacggatttcaggctgacgccgtccgccgccagcagggagacgcgcatgcccttgaggttgccgtccgggttggcgtacaggctcagcgccgggtctttttccaggccgcagaccggtttgggaagttcccggttaagctgttcctccgtgagttcaatgcccaggtttttagctactccggctgccaggtttgggtcaatgcgcgtcagcaggtccaccacccgttcccggatgtacgggcgcgtcaccttgcctacttcaaagctgaaggcgtcaatgatgtgcctttgctccacgggagtctggctcatccagaacaggcggggctgggcatagtattccgcgaaggaggggctcctgaggcgttccttgacgccgctcaccggctggggggcggtggagaaaccgccttcttccgggggcgtttcacgcggccagttgtccccgatggagttgggatcgtaattggccggagcggtgtctatctgcatgcggtggaagccgtccctctggttattgtggaaggggcagacgggccggttgatggggatttccgtaaagttggctccgcccaggcggtgccgctgggtgtcgctgtaggagaagatgcggccctgaagcagcgggtcgtcggaaaaatcgatgcccggcacgatgttggcggggcagaaggcgacctgttccgtttccgcaaagaagttgtccgggttgcggtccagcaccatcttgccgacgatttccacgggaaccagcgcttccggaatgagcttggtggcgtccagaatatcgaagtcgaatttgtctgcgtcctcttccggaatgagctgcaaaccgagttcgaattccggataatccccggcttcaatagattgccagagatccttgcggtggaagtccggatcgcgtcctgtcaacgcctgggactcatcccagatcagggattttttaccatacgccggtttccagtggaagcggacgaaggtgcttttcccttcttcattgaccagcttgtacgtgtgaatgccgaagccttcaatggtccggtaactccggggaatgccgcggtcggacatgagccacatgacgttgtgcagggtttcaggctggagggagacataatcccagaaggagtcgtgggccgtctgcccctgaggcatttcattgtggggctccggcttgacggcatggacgaaatccgggaatttgatggcgtcctgaatgaaaaagacgggcgtgtcgttgcccaccaggtcatagttgccttccttggtatagaacttggtggcgaagccgcggatgtccctcaccgtatccggagatcctcggaagccctgcacgttggaaaaacgcacaaagaccggggtcttttctcccggatcctgcagaaagcccgccttggtgtacttggaaagggacttgtatacctgaaaatagccatgtgccccggaacctcttgcgtgaaccacgcgttccggtatccgctcctggtcaaaatgagccattttttccagaaagtggaagtcttcaagcagagaggggcctctgcttccggctttaagtgtattttggtcattggctattttaactcccaggttgcttgtgagcggctggtccatgccgttggagcgcatggtgtccagatccttgattttttccgtggtattgtccggcattttcatggagccgggagcggagggttccgcattgggcggcgtaggcttcggagttggcttgatcagctccggatcaatcgtatccgtgtaatggggttccgcttcctttccgtcggtgaaaggagcgaggctgtcttccatgggcggcgtcttttttttcatttgtttgttcatgatgggaccgaatttcttctatacgggtaagggttcgacttctctttttccggtgatgttctgtcatgttttgtcagcagcctccgttcagggatgatggagattcgttgaaaagaactcgacttgaaacgtttatatgatagagaatggcatctatggaaaaggcttgtttgattggcatggcttttctgcctgtggtccatgcttcattcgcagcagggcagcaggcggaagaccgcggggatgtagccgtggacacgcggacggccttcgggaagcctccgcgttccctgcatctggaaccggtggagagcctctcagtgccgaaaaatccggatattccctacggcatgattagccgcgtgcatctctatgccgaccgctcccatggctcgggtgaagattccatttatctggtggcggaaatgaatttctgcggggaagacggggaccagccccatattgtgggaatctttgccggttctcccacaggggaaccgtgcatgaggctggcggacctggacagggacggcattcctgaactggttctggttcatgaagcgggagcaggagcttcatatatgcgcatttttcgcatttcccaagaaccgaatgtctccgacgataagagctgcatctccgcctctgccatgctgaagcaggtgggctgctgccgcacgggaatgggaaccgtcaggctggaggatgacggaacggtggtggtaaagacttatccggaaggaggaaagattccggcatccatgaaaaaataccgtctggaacagggggcggacggaatgaaggaggtggaataaacaggagcggagcaggggaagccggaataggagggagcagcgcagcgggacgggggtacgctgcgtacatgaaatgggacggaacttccacaaattttcatagacgcggggaataaataggttatgatttttatatcaatcgggtattggaaaaaaggctcatgccgttatggcgcggggcggcttttccggtatggaaccattttcctatttaattaaagtgatgacggtgcaagaaatagctgaacagagtttgaagagccttctggcctccctgggtttttccgcggatattgaagtaacggaggcggacggcatcgtgtgcctgaatatttcctccccggattcccagtacatcatcgggggagacggggacaggctggacgacctccagtacctggtcaaccgcatgatccagcgcaagatggaggatgcaccccgcgtgaaggtggattgcgaccactaccgggaaggcaacgaggcccgcctgctggaaaaggcccgttccctggccgaacgcgtgcaggagagcggcaagccgatgaagatgcagccgctgaacgcctaccaccgccgcctggtgcacaatgcccttcaatccatggaaggcattgcgacggaatccgaggaaggcgacggccgttacaagcgcattaccatccggcgcgcctgaagccggcagttttcatgaaggttgcagcggttattgcgtctgtttgcctggcgctggtgacggcggttccgggccgtgcggaagcggaggattcccccgcttcctgcgccgcggctccttctccgccgcctcccgtgctggtggtgtacggttccgcggaacccggcgcggcggaagcccgctggctgaaggcgctccgtccaggaacggaagaacgccgtgcgctggataaacatgtccgtgacgtgcagtttgtcacagtgcccaaacgtccctccgtgaaggattgggaagaaggcgggagcctgttccgtgctgcagagcatggcgtgcgcgtgctgcctgcggtggttttgcttgattccaggggacgtgtatttgacttggtggaagggggagcgcaggccgcatccctgcgggaaaaggcggccctgctggcggataaggcccggcgcgtgcgcccggtgactttggtgaatgacgttccgaagggtggagaccctgcggaggaggccgccgccatttgccgggcgttggaaccggtgccggcggaagcctggttccgggattatccgggaacgatgaaacgcctggaaaaactgaattgcacggttccggcctttctgaacgcccgcgcggcagcccgccgcctggagaaaaaccgggaaacggcggcgctcctctgcgaatccttccaggcctgtgatgccccttccatccggaaatgcctggaagcgtggcggaaaagggcggatgatccctcccttcccgtggaagaacgccagttgatcctgctctccatggtgcatcccctctgggtccggctggaagaggcgctgtaccgggacgcccacacggcggagagtgaggaggctttcaaccgggcggttgccgttctggaggaagtgcgggacatggaccgcgccagcgtttgcggcaggcgcgcgcaccagctccgggaagagctgaggagggctcgcctggctgccgcgcggtatgattgatgcggttttccggagcttccggaaacggacaggaaggcttcccggttgccgtcacggaatcaagggacgcgttttttcttcgtgattcccttctccacaggaagggcccggcaaattggcttgattttgcccctgtccggggctagtcttcggaccgttatgacagactcatccatcccggacatgatggcggcggcgcgccgtgacaaatggactgaccagcaactggccgccaaggctgtggaactggcggaatccattctgaaacagtcgaatgccgggatgcgcaggaaggagaaaaagcaggcggagcagatggagcgcatgatgaacgaccctgcgggcaaggcctttacgctggcgctggcggaccgcgtgttccgcccttcctcgccggcgcggggcgcggagctgttccgctacctgctggacggctacggtattccccgttatttgtccgccgcggaccggttcgccatgaagctgggggacaaattctccgtacaatttcccggcgtagtgatgcccatgattaccagccagttgcggaaggagagctccaacgtgattcttccggcggaggatggaaaactgcgctcccacctgcgccgcaggcgcaaggccggcatccggatgaacatcaaccagctgggagaggccattctgggtgaaagcgaggcccatcaccgcctccagcaggtcgtggaccgcctggcggacaaggactgcgattatatttccgtcaagatttcagccattttcagccagattcatctggtggcctttgaagaaaccgtgcagctgattcaggagcgcctgcgcatcctgtaccgggcggccatcacgaatgcggtgacactgccggacggctccaaaagacccaaattcgtgaatctggacatggaggaataccgtgacctccacctgacggcggaagcgttcaagcgcacgctgatggaggatgaattcatgcagatggaagccgggattgtgctccaggcttatttgccggactcctgggaggaacaaatgaagctgtgcgcctgggcgaaggagcgggtggagaagggcggcgcgcgcatcaaaatacgcctggtgaaaggcgccaacctggcgatggagaaagtggaggcctccatgcatgactgggcgcaggccccatacggcacgaaggcccaggtggacgccaactacaagagaatgctccattacggctgcatgccggagaacgccagatatgtgcagttcggcgttgcctcccacaacctgtttgacttgtgttatgccatgctgctgcgtgagcgggaaggcgtccgggaccatgtggaatttgaaatgctggaggggatggcgaaccatcaggcgcgcgtcatccgccaggcggcggacggcctgctgctgtatgcccctgtggtgctgaaggaagacttccacagcgcgattgcctacctggtgcggcggctggatgaaaacaccagtgaggaaaacttcctgcatgacctcttcggcatgacgccgggctcccggagctgggaggcgcaaaaaaagcggttcttaaaagcctgccaggagaaagacgacgtgaaatacggccccaaccgtacgcagaaccgcgctacggaccccgtgcagcccacgcattaccgggacgcctttgccaatgagcgtgatacggactggtccctgcggcagaatgcggaatggatcaacggcctgattgccgcggaaaaggaaaaatccggcgaggaaattcccctggtcatcaacggtgaggaaatcacgaccaacctgtggggcgtggggcgcgacccgtcccgccacaatgaagtctcctacaaattcgcgtatgcggactttgaccagattgaacacgcgctggacacggcggacaaggcccgcgcctcctgggcgtccaagagcgttggcgaacgcgctgaaatcctgcaccaggcggcgcaggagctgtccagaatccggggggaggccattgcagccatggtgagggacgccggaaaggtgcccacggaggcggacgtggaagtgagtgaggccatagacttctgccgctattatgcggaagggctggaccgcgacggcatgaacgacggcgtggaaatgaccccgctgggtaccgtttgcgtgatgtctccctggaacttcccattcgccattcccacgggcggggtggccgccgcgctgatggcggggaacacggtggtgttcaagccgtccgagctggccgtttatacggcctggcagatcgtccaggcgttctggcgcgccggggtacctaagagcgtgcttcaattcgtgccgatgccgcgcaatgaaatttcccacaaattcctgatggacccgcgcctgaacggcatcatcatgacgggctcctaccgcaccgggaaaatgctgcgtgaactgcggccggacctgcatgtgctggctgaaaccagcgggaaggacgccatggtcatcaccgccacggcggacccggaccaggccgtgaaagatttggtgaaaagcgccttcggccattccgggcagaaatgctccgccgccagcgtggctattgtggaggcctccgtctatgacaacccggcctttttgcgccagttgaaggatgccgcagccagcctgaaggtggggggctcctgggaggtcagctccgtggtgacgccgctcatcaaggaaccggaaggcgacctgctccgggcgctcacgcaactggaacccggggaggaatggctgctcaagccggaaccctcggaagacaacccgtgcctctggtcgcccggcatccggttgggcgtgaagcctggaagctggttccatcagacggaatgcttcggcccggtgctgggcatcatccgtgcggaaaacctggaggaagccattgacatccagaacgactccgaattcggcctcaccgggggacttcagtccctggatgaacgggaaatcgccctgtggaaaagcaaggtgcaggtgggcaatgcgtacatcaaccgcgtcatcaccggcgccatcgtgcgccgccagccgttcggcgggtggaaccactcctccatggggcccggctccaaggccggcggccccaactacctcaccatgctgggaagctgggaggaaaaggcgctcccgcagaaactgcgcacgccgggggaacgcatcaccgggctggtggaaaagctgtgctccgaactgccggactgcgccaagcgcatccgttccgcggccggttcccaggccaagtggtggatggaggaattcggcgtggagcatgacccttcccatatctacggggaaaacaacacattccgttacgtacccgtgaaggggatactggcccgtgtggaaaacatgtctgacgctgacgccgccatcctgctgctgggcgcgaaactgtgcggagcagccctgcacctgagcgtggaggaaggccatccctggattcagaaaatgaacggttactatgcgtccctgacggtggagacggaagccgaactcatcgaccggatgccggaggcagcccagggcgtgaaattcctgcgtggaacgggcatctccgaggctctggcgaatgccgcccgcgcccgggatgtggaagtgctggaccggcccgtgcttgccaacggacgcctggaactgctgggctatttccgggaacaagccgtttccgaaaccgttcaccgctacggcaacatcatcccgcctccgggcagtttcaagacggccggggcgtgaggggagccttgaaccctggctcccaggcggcgtgattatgagtataaagacagcgcaggaaaatgcccccgcagtccaaacggaaaacgccctcctgggaatgaaggccgggcggccttcattggatgaactgccgccgaagccctgcggagggatttttcttgcaagggcgggaaaaccgggcttacccggttgggtaaaagataaactctgccggatacaggaaattccctccggcaaacggtgaaaagttaaagtagcacggaagagggcctgcggcgtttattgcgcccttcgggcggcaaaaaagttgaaatccacaggaaacgcggcctcttctgactggcttgccgctgtttttagcttcttcccgtgctttcttccgctctcgtaggcctgttcctgggcgcttttgtttcttttccccattttgtgatagaacgtttccgggaaacgggtatatttcctggaacgaccgcgacgatgcggcaattttccctaccacacatccatgagcaccaaccaaccactgacctctcacggcacccacatcgcctgggttgacttcctgcgcatcctggcctgttttctcgttgtagtggcccattgctgcgatccgttcgtaggcagttttgacggcaccttcaactttaaatccgccgtcttctggggcagtctggtgcggccgtgcgtgccgctgttcgccatgatctccggcgtgctgctctttcccgtcaccatggaaatgggcgctttttactccaagcgcctcaaaagggtgctgattccgctcgtcgtctggtccctggtgcttcccttgctctacttcggctactttgccgcgggcgtgcatacggccagccccaacatcgtgatggacaactacacctggagcgccaccgtcggcaagctttacacctttctcttcaacttcaactatgacaccacgcccctgtggtacgtatacatgctggtgggtctctacctcttcatgcccatcatgagcgcgtggctgacgcaggccaaaaggaaggatgtgaaaatcttcctgggcatctggatattcagcatgactctcccctacctccagatgcttgccccggcgctgggctatgaaggcaattacggcaacatgggcattctgggcgtttgcgactggaacccgtacggcatgttctataactttgccggcttcctggggtacatggtgctggcccattacctggccaaatacccgctggcctggagctggaaaaagatgctcgccatcactgttcccctcttcctggtcggctttgccgtcacgttcttcggcttcctggaaacgcagaagcacttccccggccaatattccaagcttgaggtactctggtacttctccggcatcaacgtcttcctgatgacctttgccatctttgccatcgtcagcaggctcaggatcaagcccggcccggtgctgggcaaggtggcggcgctcaccttcggcgtgtacctgtgccacttcttctttgtccagtgttcctatgacttcgtgaacttcattggaatgggggggctccccgccgccgtgaaaataccgttgctggcctgcctggcctccgccgtctccctggcgctggtatggctgttgagcctgaacaggtggacgcgcaaaagcattatgtaaaccgcggatattttccgcagggcgcttcaggaccacggcagtcccggggcgccttttcttttgtggaaaagagaataaggcggtttccggggaggggcctgcaaaattctggacgggaaagagggaacaggctaggatattcctgcatcgtgcacaggccctggttgccggagatgtgggctttttaacgcatgaaaagcgcgtctcccggtctcccttccgccaaccccaagctcacagaaaattcccgggacaccggcgatttacgtaatccgttggggttctaatcttgacaactatcatctcttttttacggcctggaatacgtgtgcctccatgggaggttggcgcaaaacacccgttgcgctgttgatactcaaaccataggcgccccggccgtcgcactctcacgagtgcgtggattgaaacttgttagaccgggagaacttgaacgaatagcatcgtcgcactctcacgagtgcgtggattgaaacaggccatatagcacggaaacggtacgagctataagtcgcactctcacgagtgcgtggattgaaaccgtgcgctgggctacccttcaggacgcgggcgtggtcgcactctcacgagtgcgttaattgaaagtccacatgtctgcgcggggcgcaagcctctcatgcactgcttcttgaaagaggtgcagaccaaagctttattttccgcaaccgtatcgtttggtgtttggtctgttcccctgttattttaagaaaggacggtaagaatccggagtggaacgggatgacggctcccttccgtttacctctcagattggcatggtttgcagccttttaatgtccgtccgcggcgggttgccgaacatgcgcttgtattcccggttgaattgggtagggctttcgtacccaacgcggaaggaggcgtttcctgcgtccatgttttccacaagcatcaggcggcgggcctcattgaggcggatgcgtttctggaattgaagcgggctgatggccgtgagggtacggaagtgctggtggaagctggacgggctcatgccggcgcggcttgccagttccccgatgctcaacggctggtcgaagtgcttttttatccagtcaatggcttttgctatctggctgctatggctttcagccacgacgatctgcctcaggcgccctccctgttcgtccatcaggagacggtaatagatttcctgccgcaccaggggaaggaagacggggatgtccgcgggagtttccagcagttccatcaggcgttccactgcattgagcagggcgggagtcattttgctgatgccgatgccccggtctgtggggcgttccggacgcgtggccacgctgtcgtgaagcatcagttgggagatttcctgtaaatccagttccagcgtcaatcccaggtaaggtttttccgggctggcctccatgattttagagacgaggggaagctccacggaggaaacaacaaaactttgcgcatcatataggtaggcttcgtcccccagcaggatctgcttggttccttgtgcgatcaggcaaagatggggggaaaacatatagctgtgcggttccgtgggggattcccagcggtggagctccagcccgggaatggccgtgctcacctggtgtttcccatacgtccagcctgcaatcattccggcaaggcgcagcggtttccgttgacggcaagcaggagttggcagggaggcggacgtttccccctgttccttttctttttccttcatgaaggcttcatgttattcaaggcagggtgcgggagcaacttcattttgtttcattttgcaggatcaggcaataatgcaggaggaccgggctacctgttttttcctctgcctgttaatattggcaaggtccggtgggaacgccggaacaataaaacaggaaagaacaaccaatgaatacgaaatttatcatcacccgtaacgccggaattctggcggcaaccgcgctgggcgcttttgccgtgtccggcagcatggcttctccggcggacaagccctcggacgcggacaatttttacaagagcggccgggtctcccagcaggaggttaagttcaataaccagtatcgcatgaaggtggccgggaacctgttcctgcccaaggacatggataaggaggccaggtgccccgccattatcgtgggccatcccatgggagcggtgaaggagcagagcgcgaacctgtacgccgcgaagatggcggaacggggatttgtgacgctggccctggatttaccgttctggggcgggagcgacggagaacccaggaattccgtttctccggatatgtatgcggaggcgttcagcgcggccgcggattatttgggcacgcggccttttgtggaccgggaccgcatcggcgtgatcgggatatgcggcagcggcagttttgccatcagcgccgccaagattgatccccgcctgaaggccattgcgaccgtcagcatgtacgacatgggggctgccagccggaacggtctccggaagtcgcagacacccggtcagagaaagaagattctggcggaagcggcggagcagcggtatgtggagttttccggcggatccgtcaagtataccggcgggaccgtgcatgaacttcgcgaagattccagtcccattgagcgggaattttttgagttctaccgcactccccgcggcgagtttactccggagggacaatcgccggagcttaccacgcatccgacgcttgccagcaacgtgaagttcatgaatttctatccgttttccgatattgagacgatttctccccgcgccctgcttttcatcaccggggaggaagctcattccagggagttcagcgaagacgcctacaagcgcgccgccgagccgaaggagctttaccgggtgcccagggccgggcatgtagacctgtacgaccgggtgaatatgatcccttttgacaaattgacggattttttcagtaaaaacctgaagtaaggcctggtgctgcccgggagtatcccatggaagctttttcccggtaatgttcccggagcacacgattagagaacggaaggaaaggttttattgggaccgtgtgaacgggagagcctcttttattgcatcattggcagaaggccatggcgtacaagaagagtaagtggatggattttattcagggttctccgctttcccgttgccggggcgcccggtagttccatgggcgcggaatggtccatggatattgtcacttgaagaattgaaaagaaaaacagatggatatattggaaagaatgcgccggggagagttgatacggctggacgatcccgagtacccggtcatagaagagttgatcacgagggccttccgcatcaccggagagttgaatgcgggctaccatgatgccgcagagacgcgggctgtcatgagcgaattgacgggggagttgatcgatgaaacgacttggatcgtgccgcctttttatactgatttcggccgttttacacggttcggcaggaacgcattcgtgaattgcggctgcacgttcatggaccgtggcggaatcacgattggtgacggcgtgctgatcggtccgggagtgaagctgattacggagaatcacgcggaggaaccggaattgcgccgtcatgtttatgggcgccccatcgtgataggacggaaggcgtggataggggccggggctaccgttttgcccggcgtgacggtgggggaaaatgccatcgtggccgctggggccgtcgtcaccggggatgttccggccaacgcgattgtaggcggcgttccggcccgggttatcaggaatatcaggcaatgatgattcagggcgagcaacggaaaggagccgcagatcccgggaaataacggcgttgaaatgcccgtggagggattaaggcgttgacggatgccggcgccgtgataagaaatggcgtggactccggttgattgattttacctttgcagggctgaacggagagggggcggctgcggttgtccgcagaggcggattttcccggaaggtactgtcgccacacggaaggaggacggttatggcctgggctatcggcaccggcaattttcagcctgaatagttcggagtacctctcccgccgtgcggctgccgttcctgtgaagagccgggagaagttctttttccggaaggagcggagggttaaagttcacgggaaagaggggaagtgccggaggggcggcctcctgccgaagggggacggaaaagattttttcaggcaggaggcggggtgcccccgcagcacgtatgacaggacggttgcgcgggttttttgatgccggtatgcccggatgggatgggaggttgttttaaaatgcgttcaccagtagcatgttgagtaatgttttaatgaggggtgttttgcgccgcgccgggagaaggggagaagaagttggatgaggcggccatgggaaacgtcctgattcttgagctttttttctcgcatgctgtcaaaggtttatacagcatggaattgtacgatcaggtagaaagaatagttgatgatggaacattcagtaatttttccggaccatcggaaggtttgcgccctggggcagggaacttggaagatgggaaaatccgccttgagggaagccgaagaagtagaggcgctgcgtgcgggcattgagcttggcatgagcgtggttgacacggcggagatgtatggcaacgaggagttggtgggaacggcaatccgcggattgcgcgaccgtgttttcctggttaccaaggttctgcccggcaacgccagcaggaccggaaccaaggcagcctgcgaacggagcctgaacaagctgcggacggattacgtggatttgttcctgcttcactggagcggtccccatcccattgaagatacggttgcctccatgattgagctgcagcaggagggtaagataaaggcctggggcgtcagcaatatggatgttccggaaatggagcgtttttatgccgtcccggggggagtctcctgcgccgccaaccagattctttataatctggcccatcgcggcgtggagtacgacctgctgccgtggtgccgggagcgccacattcccgtgatggcctattcgcctgcggatgaagggcggctgtcccgcaatccggttctgatggagattgcgcagaagcatgaggccaccccggtgcagatcgcgctggcctggattctgcgccgccccggaatgattgctatccccaaggccggttccgtcatgcatgttcaggagaattaccggagcttgtccattaagctgactgcggaggatgtggatttgctggacgaggcttttccgcctccgggcaggaaggtgcatctggattcctggtgagccatggtgcgggccggcccgcgggcgaaacgggacgcacgcatttttcccgcatcatcaggagcgccgcaagcccttgcgtcaactggggcggaagggcgccagcgaacggtttttaatacacgcgtaccctgtggacatgatggggcattggctttttttgttcatggagaccggggaatcgcctgtgcgtctccggaaggggcccttccggagattttttctacttgaaatggaaaaaggaagcagggaaaggcggcaaatctccgtgccacatagtggaaaagggagaaaaacactcatgaacggtgcatcagaggtgctgccattttctggttccagcctcttccggttgcgaagagggttttaacgcagccgtaaaaaaggccgcccttccggaaatacggtgttccgggaagggcggcccatggtgagggcgggataaaaagcgttacagcggctgcgcgtccgtcctgggtatccagacaggcgtgttctggaaggtgctggcgtagtaccaggagccgcgttccacgcgcaggatgagcggggtggattccggcagggtgatgaccgccgggctgttcatgtccgccgcgtgcctgccgggcgttttctgggtgacgaccagcagccgatccgccgggatggattccggggtttccgggtacatgatgtagttcatgatggccgccacggtgaccagtccgctgagggtggccaggatggtcagcagcgccccgtgcctgcgggtgacggtcaggagcgccaggaaggtgagcatgacggcgccggacaggatggagatggggcctagcgcatcatggctgatgtaagtgagccactggttttccgtggtattggcggggaggatggccccctccttgcgttcgatgaattgcaggttgtatctggcttccgtgaagtacggggagagttccagcgcgcggcggtagttgagggcggccagaccgggcttgttcatgcggtagtaggagttgccgatgccgaagctggcataggcgcgttccgacttggagaggtccgtatcgttgctttccctgctgaagcagtcaatggccttggcgtattctccctgttcataggcctgcacgcccaggttgtccgtttccgcggcgtttccggctgctccggccacggacagggccaggacggcggccatgatgagcacgggaagcttggcgatggcttttttaatggcctggagcatgtgctggcgttccgcgtgcggcagttcgtccgaagagccggagggcttgaacgccctgtcatcccggagctgaaggatggttttcatttcttcattctgcttggaaggaggaatgtaggattcgatgaagttgccggcggctcgcaggaattccgtgggactggcctggcgcggcgtggaggcgagcctccggaaggaacgcatgcgttcccgggccgtgaagctttccttctggactctccggatgtagcggatcagggccatgcccagcaggacgacggcggggatgtaggccaggaagtaccatccccagtgggccggagcggtgagggcgttcatgacggcggcgggcatgatcccgtaaatgtccgtcatttccgctaccggaatggtgcctgccgggggcggcgtggcgggagcggctccgccggccgccgttccggtgatggcggaggccttccattccaggggaatgggggaggtggttacggttttgtactgttgcgtgctggggccaaagaaggtgagttcaaagggcgggatggcgtccgtctgggcaatcggacgcatcatttgctggaattccacggttccctggatggagcgcgtgttctggcccgggtccagcttgttgggcgggtaaagcttccagttggaagcgtccgtgagggccgggcaggcaatgctgtggatgttgcccgtgcccgtcaccttgattttaacggtgatgggttcattggcgctgagatcccgggcatccgtgctggcggagatgcggaagtcccccacggcgttggtgaaagaggcgggcgctccctccgggagttcctgggccgtgattttcacttccggaatggacatttccaccagtacctccgagcggatgaagttggcgatgagggggtccgcttccggcagggcggcgcgtgccgtgacagtgcccgccgccgtgacttccccggcgcgcagcgggaatagagtgctctggaaggtcatgacgttccagttgacgcctttatagagcacggagccgcggggctggccgcggagcaattccaccagcgtgggttcaaagcgccatgtagccaggttggaggtggtgatggtgggcgccgtgtattccagaatgtattccggagcataaattttcagttcgcagcggtccggctggtggacatagggcttctggttgtccacatgccacagcatgccgtacggaaccgtagtgccgttcaggttcagcgtattccacttgatggcgctgtacgggtagacggtcagcgtctggggaagcgtggtataggagcggccgttgttggcttgcagggtcagggacgggatttccacggtgcccacttcgtccggagttacttcaatagccatcaggaaggcggactggttgggggaccccggccagcggatatagttgccctggctgacccagcgcaggctggcgcccttcaccctgggaagcgggtcctggcgggcgatgctgccgtccgtcaggatgatgaagaggcgggtttgttctcccggcacaacggcgtcggacagccaggtggtgaccacctgctgagccatgagcgtgacggtcatgcagaagaagagcgaaagaatggcgagcagttttttcatcatgttgcgggatatgtttgaagggttggcatcgtggatgcgggcggaacgggttaataatccttgtccggaggaatttccggcgaacgctggggaacggggcagccgggttcaatgtccctgcgttccatcaggatggctcttgcctcccggcgttccttttcctccttgctttccttttgcgtggctaccggtacgggcttgtccccttccggctgcggtttttccatgccgggcgtttcaggcagcttgtctttttccggggaggaggggagctgggcgtttttcatttcattctcgtccctcttgttttccttgcccgcggcgttatccttgtcttggtccttgttctggtccttgttctggtccttgttctggtccttgttctggtccttgttctggtccttgttctggtccttgttctggtccttgttctggtccttgttctggtccttgttctggtccttgtcttggtccttgttctggtccttgttctggtccttgttctggtccttgttctggtccttgttctggtccttgttctggtccttgttctggtccttgttctggtccttgttctggtccttgttctggtccttgttctggtccttgttctggtccttgttctggtccttgttctggtccttgttctggtccttgttctggtccttgttctggtccttgtcttggtccttgttctggtccttgttctggtccttgttctggtccttgttctggtccttgttctggtccttgttctggtccttgttctggtccttgttctggtccttgttctggtccttgttctggtccttgttctggtccttgttctggtccttgttctggtccttgttctggtccttgttctggtccttgttctggtccttgttctggtccttgttctggtccttgttctggtccttgttctggtccttgttctggtccttgttctgctgctcttgttgttttttcttttcctcttccaatttcttctttaattcctccaactgcttgcggtattcgtccagagatttgtcgtaacggagcatttcctccttgttggcggccgctccttcatgggagccataggcggagagggcgtcgtcaaagcgcttgacggcttccttgacgtgttctttcgccacgggtatttttgccaggcgggcgtcgatttccttgatctggtcatcaatggaagagggctgtgcctgcggttgttccccttccggcctggagaaggtcatggttttgcgggcctgggcggcttccaggttgccaaggttgaagtgggaatccgcctggagggaggctttgggagaaaggagcgcctgggagaatgcttccgcggcttccttggggttgtccgctttttgttccaggcagcctttggcgaattccagggcctggcgcgtttcttccgccaggtctggaacggcgagcatttcatcaatggccttgacggcttcctctgtctttcccgtccggatcaggtccgtgacgttgtccagggcgctcgtgtccgcgcgcgcttccgtgcccagcagtccggcgcagagcagggttgcggcggccagggcggtcatgccgcggcgtccggaacggtggaaggagcgccagcgggtacctgccagaagagtgaggagcaggcagatgagggccggaacggcaaagatgacgtagcggtcgttcggcacgcggcgcacttcctcccggccttccgtgatgtccaggcggtccgcgatgtccctgacgaagcggttcagcgccgctccgtcggagagctgcacatactggccgtccgtctgccgggccaggtattgcaggctttccggattgagcttggagacgacatgctggccgcggcggtcccggtacaggccggagggggattgctcatccggaatggtggtgccgatggtggtgccgatgcccgccgttacgatgatgagctggtgctgcctggcggcttccgccgtcttgtaagtgatgttgacggtgtcttccccgtcgctgaggatgaccagggcgtttttggcgtccgcctccttgtcccgcttgaaggtctggagggccagccggacgacgttttccagattggtgcctccctgggagacccagccgaattgaagctgttcgatggtttccttcagcgcgttgtggtcatgggtaaggggcatgagcaggacggcgtccccggagaagatgatgatgccgaagttgtcccccggaagggcgtccagcaggtcgtaggcggcggttttagcccttcccaggcgggtgggggaggcgtccttgctgagcatggagcgggagcagtcaatggcgatgaggatattgcgcgatttgggaatctcctttacctccgtgtagccgtccaccggacgcgcgatggagaggatggcgaagatggaagccagcacggcaaagatgacggggagcacccggtgccaggtggccggagcgtgaaccagctcctgccggtattccggggagacgagcacttcccattttctggaacggcggcgccacagccaccaggccgccgccgcgagcagggccgggaggatgagcgcgtacagaacgttgggataaaggaaggtcatggcgggaaagggaaggtgttacggggcgggggcgggtttgagcacttgcagggagaggcccagaagcgtcagcgcggcgcccgttacgaggaagtacatgaagtattcttcaatgtggcggacggtctgcaccttggcctcgcttttttccagcttgccgatggaggcgaacgccttgttgaaggaggccatgttcgtggcccggaagtgctccccgcccgtgagctgggctattttccgcagggtgggttcgtcaaattcgctttgcaccaccattccgttcgccagggtgccttcttccgtgcccacggcgatggtataaatcttgatgcccagcttggccgcgttttccgccgccaccaacggggatatctggccggagttggaggcgccgtccgtcaccaggatgatgattttggatttggtgtccttgcggtcgtccagccgggtggccgccgccgcaatggcggagccgatggccgtgccgtccgcctggatcatgcgaggatggaagtcccggatgatgccgttgaccagggcatggtccagcgtgagcggacagaaggatttggttttcccggcaaagcccacgatgccgatgcggtcgtccggacggctgtcgacgaattgggtgatgacatgcttggcggccaccaggcggttgatgggcatgcggttgaggaccatgtccggcgtctccatggagtaggagaggtcaaaggcgatcatgatgtcaatgccgttgacggtgcggaaggttttatcctccactttttggggacgcgccagcgcgatggcgagggccgccgccgccagcacgaagcaaatggcccctatttttccggccagggattggggattgcgcgccagggaggagatgaagcgaacggtcgggtaggtgatggagccttccgccccccgcctgcggcggaggataatgaggcacaagatgaagggaaggacgtagagccattcaggttgtgcgaattggaagtgttccgtcatggtgtgctagcgttggttggggcgtggggaaggttttttgacgacgaggtccgtttcctccttcgtgcggtgtgcgtccgcttctatgtcgttgatgagttggaccgtgtcgtccgccagttcgttgaccagggagtcgttttccggagtgtccggctcatatttcagggaggccatgcggtccagcaggtcgcgcgtgggaccctggagttccgaggggagcgcggtgagcgcgtccgcccggcggttgaattcctgctgggtttcatacagcgccgggtctttggtttcccccaccaggtatttccggaggagaagggagaattccacggcggcctgcctgagggaggggtgggtttcccggagcatcgtgatgtcccggatagcggtttccgccgggctgagcggcgcggcgggggtgcgccccttcctgcggatgagcacgatgacggctatggcgacggccagcaggatggaggtgagcatgatccagatgccccacgtatcccagaagcccgcttgaaggtaggcgtccggggactgcgtttccatcagcgtggggaaggccggcggttccggaatggccgtggggggagtctggaaggtggcgggtgctggcatggctggcggagaagggtttagcgtgagaatttgcgggacctcctggtgaagagggcctggaggggcggcatgaagttgtccgtggtctggaggtccaggaaatcgatgcccaggcggcggaagtcctgcgtccatttttcacggtgcaggtgcacgacgttggcgtgggcttcccggacgtcctggcgggcgaggttcaggaacatgcttttgccggtttccgggtctttcaggatgacgcgcccggcgtccggaaggtgcagctccatcgggtccgcgatgcggatggggatgaagtcgtgcttgaagttgagctgtcccagggcggccttgttgtgctcgctccagaagtcgctgagcatgatgaccatggctgcctttttctgggaaaggacgagctgccgggctacctccgcgatgctttgatccgccccgtcgtttttactggctacgatttcacggacgatgcgcagggtctgcttgatgcccttggccgggggaatgtaatgggagtggctgttcccgtaaatgaggaggccgcacttgtccccgctctgggccgcgctgaaggcgagcaccgcggccacttccgccgcatagtccagcttggaagcccgggccgcggaggaggcgtagtgcatggagccgctgacgtccaccgccagaatgacggcctgctcgcgttcctcccggaagcggcgcacgaagggggagttcatcctggccgtcaccttccagtcaatgaagcggggatcgtctcccggcgtgtattcccggaagtcgtcaaagtccagcccctggccgcggaagccggactggtattgcccggcgaagttttccgtggccagatgcctggcgcgcagttcaatgcggcgcacgcgcttgagaatgtctgaggctttatccatgaagtgatcctccctgtttgaattcaatcaggttccggtgaggcgccccgcgggggctgaaggataagggcggacgggggagccgcctcctgccgtcacggcacgggaaccttcgtcaggatgtggtcgatgacgtcgtccgtggagatgttttccgcttccgcctcataggagagcaggatgcggtggcgcaggatgtcatgggccaggtccttgatgtcctgcggggtgacgaaggagcggtggtgcatgaaggcgttggcgcgggccgccagggccaggttgatggtggcgcgcggggatgcgcccgcgcggatgaggccgcgcagtttcacgtccaccgtttccgggaagcgggtggcgcgcaccaggtccacgatgtagccgcgcacggcgtcgtcaatgtaaatctggttcaccaggtcgcgggaggccgccacctgttccggcgtggtgaccggggaggtttccggcggcttggcggagctggccatgaggtccagcacctggagttcttcttcgcgcgtggggtaggtgaccagaaccttgaagaggaagcggtcaagctgggcttccggaagctggtaggtgccttcctggtcaatggggttctgcgtggcaagcaccaggaaggggtccggcaggcggtaggtggtttcccccagggttacctggcgttcctgcatggcttccagcagggcggactggaccttggccggggcgcggttgatttcgtccgccaggatgagattggcgaagatcgggcctttcttggcagtgaactgcctttcctccggattatagatcatggtgcccagcaagtccgccggcagaaggtccggcgtgaactggatgcgggcgaactgcgcgtgcagcgtgcccgccatggcttttacggagagcgtcttggcgaggccgggcacgccttccagcaggacgtgccccttgcagaggaggctgaggatcaacctgtccaccagcgcctgctggccgatgaccaccttgcctacctccgttctgagagcagaaatccacgatgagttcgcggcgataatttcgttgaattctcgggtgtccatgattcttaatagcgggtgagacagtctgccgggcgcttgcgttgaaaaattccgattatttcccaagggcaaatccggttttcaagagaaggtcttcccggaaatggggggccgtcatctggaagcccacggggagctccatgccgccttccttcacggttccgcaggggatggacatggcgggcagcccggccaggttggcggggatggtgtagatgtccgccaggtaggtctggaggtggtccagcgcggagtccccgattttgggggcgggggagggggaggtggggcctacgatgatgtccgccctggaaaaggcttccgcgaagtccctggcgaccagggagcggaccttctgcgcgcgggagtagtaggcgtcatagtagccggagctgaggacgtaggttcccaggatgatgcggcgcttgacttcaggtccgaagccttcttcacgggtgcgtgagaagagctccaccaggccggcggcgtcttccgcccgcttgccgtagcgcacgccgtcaaagcgggagaggttggaggaggcctccgcgcaggcgatgatataataggcggcgaccacggcgtccgcatggggaaggctgattttcaccagttccgcgcccaggctttccagttgcttcacggtgttctgcacggcctcggaaatgcccggatggttgccggaggtgaaatattccgcggggatgcccactttcaggcccttgacgtcacggcccagcgcggcctcaaagtccggcacggtctcgtctgcggacgtggaatccttcgggtcgtgaccggagatggcctggagcaggatggcggcgtcttccaccgtccgggtcatggggccgatctggtccagggaagaggcgaaggccaccagcccgtagcgggaaacgcgcccgtaggtgggcttgaggcccacgatgccgcagtgcccggcgggctgccggatggagccgcccgtgtcggaacccagcgcggcgatggctgtggcggacgcgacggcggcggcggagccgctggaagaaccgccggggatgtggtccggagcgttcgggttgcgcgtgacgccgtaggcggagttttcaccgctggcgcccatggcgaattcatccatgttcgtgcggcccaggggaatgccgcccgccgccttcagcaggcggatggaggtggcgtcatagggagaagcatagggagccaggaggcgggaggcgcaacgcgtcggctggcccaggacgttgatattgtccttcacggcgatggggatgccggccagggggctggcggtgtccgccgcggctgcggccttgagggcggcctcgcggtcaaaggagatataggcgttggtggtccggtccgcctcaatggcgtccgcggtcaggttgaccaggtcggcgggggaaagttccttgcggcgcaggcggtcgcgccactgggccagggtgccttgaatgcttgacatggaaagaaaggggtaagaacggttgaaacgtgaaaaggaagggaccgggaggaggtcaggcggattccaccaccttgggcgtgcggaactgcccctgggactgctggggggcgttggaaagggcttcctcctgggaaaggccgggttccggaacgtccttgcgcattacgtccatcgtgggcaggggatggttcatgggggcgatgcccgtgacgtcgtaggattccagcttggtgatgtaggccaggactttgtccaggtccttggaaaagagggcggcttcttcctccgtcaggtcgatgcgcgccagtttggcaatgtaggctacgtcgatttggggcgtgctcatgatgggaacgtgcgtaatatataagagaaagggagggtgaggcctattgctgttccagcaggcggacgatccagcagaaggaggcggcgatggcgcagaccagcaggcccagcagcatgaagttttcacgcagctcccgcctcatgttggtggcgcggccgtcgcgggccaccacggcgcgcagggcgcggttctgggtgccttcccgcacgcggtcgggcgggggcatggtattgcggtccaggcgcatgcgggtctgttgcgcggggcgtttgagagaggcttccaattcctggatgcggttctcaatttcccgtgaggcgcggtccagttctgccagttcggaggaacggcgtttggtctttcttttaatcatgatgcggaggggctgaaaatccagatgaagaagaggatgataagggcaatcaggagcaggggaaggtggaaggaaaggccctggaggaactgggtcatgaattcgcgggagctgatgcgcactttgctggaacggcgcactcccgtaagcaccttggtgtgctgcatgcgggcgcactgctggacggcgtccgcgaattcctcctcgcagcggtcgatgacctgctggccctggttgatgaggttgtccgtgttttcaatgggccattcgtccgggcgcacggtgctgagcattttcaggctccgcgtcagggccatgtgaatctgctccagctcattgctttcctggcgaaggctttccacctccctgccgatgaggtccgcggcgttgaccatgcggtcgcccagttcgttctgctggtccatgaagcgggccttgcgcaggtgggtttcctccaggcggcggcgggagctttccacctcctccttttccttccgcagttgttccagtcggagctgggcctgttccatgtcggcatccacctggtcgtcttcctggggatggtagccgggatcggcatccatgcggcggtattggggattgcttggtttcatacgcggtaaaaatgatgcggccggtgtgcgggattgcagcattcccggccggtatggccgtgccggggaatccctgcgcgtgttattatttaactttcacaaaataaatcaagccaagaagaaggtaaaaagtgatttttcaagtatgtttccggcggggaatgccggggctttttttcttccggagccgtgcgtccggactgtcctccgggcggcatggcgccccgctttcccgcaaaggtggatgccgtgcactttttttatggtcaagggcatggaattgctggtatgtaagaaacatgcagtctgacacggtagaatgtaagccgaccatgtggtttaccggcagggcggttatcatggctctcatgttcctggggttcggagtgtatttttattacgatgcttccaccgggtatccccagaagaacctggagtttttcatgcacaaggcgtttgtggacgcgggaaccctctttgaccgtgaggtgagcgggaacggggcctccccgcaggactgggagcgcaccgttctggagcgcacggttgaattcccggaagggtaccaggtcccgtccggcgtggaccgggacgcaacgccgtggcccgacgttctggcggattacaggctgatgtccgcccccggcaagggctggagcgccgcgtggcaatcctattccggagaaaagcgttaccccatcaagccggtggaccacccgtatgacgcctccaagatttttgaacaatgggtggccggaagcatctgcatggtgctggccctggtggcgctgtttttcctggtgaggacgcgcggcaggaaaatggccctgaaggaagggcaggtaacggctgccggcagggtcttccgcgtggatgacatcgcccggctggacttgcgcagatggaagatgaaggggctggctattgcgacgctgaacccggaatgcggaggggaccggatcaggctggacggcctgacctacggcggcttccggaaggaggattcccccaataacgcggaagatttcatgaaggcccttctttccctttaccggggtgaggtagttgactatgaagaagctccggagtccggcggcacgcctgcccggaaggatgacgaggatgccgtatgagcgaatcccttccaccggaaaagaacgcccgtgaccgcgcgttcggcatcgcctgctggacgctgggcgcgctggcgttcgtcctgctgctgatggtgggcgtctccttcagcctgaccgcccgcaccgtggtggtggaaaaagtggtggaaacgcccgtacccgttccggtgcagcaaaatccggaagggccggcggctgttgaagaaggggacgaaccggatacggcaggcattgcggccgttccggcgggttcttctgaaaaaccccgttccgtggaggaaatgctccgggccgccgatttgtcggatccggcgggcgatccggtccctgcggcagtggcagccccagtcccgggaggggaaggcgtctccggccagtcacccctgccggctgagaacccggcggaagccatgccgcccatgacggaggaggtggcggagctggtcaaggcggcgcggtatgcccagattgacggagaccttaaagtagcggtggtgaagctggagcaggccatgaggctggagccggacaacccggtggtgctttattactacggcctcacctatgaatggctgaggaatgcggataaatcccgggaattttttctgaaagtatacacccagcgggaaaaggcggggaaatactttgcgcgcgcggcccagcacctccaggccggtttttccagccctgcggacctgcggggcgatatgtccttcggcaccattctggaataccgggacccggaatgccccgccggggagcgcgtcaagctgatcgtacccatcctgatgaaggatggcctgaacgtcaggccggaggacctgcgcgtcatcgtccagttctttgacaaggtcaacggcaaaaaggtggaaaaaacgcacgctccggaaccctcctcgcggtgcgtcacggaacctgcggactgggcggacggagaggaaatcatggaggtgacctactatatgccccccctgacggaggaggagacgatcgcctacggaagcctcaagtactacggctacaccgccaaattgtactacaagggtgaaccgatggattgccatgcctccccgcctgtgctatttttgctggaacagatgaaccagagttccccttccggcatgcctgaaatttatgacggcggcctgcttcccccggtggaggcgtctccggtttccgactcctatgactccctgctgcctccctgatgcctgaatcgtccatgttcgacctcccccacaacttcggcgactatacgctggtggcgttcattggccgcacgcggggggggatgctctaccaggccatccagcagggcatggaccgctccgtgttcctggagctgctggagccggacaacccggaaggcgtgggcgtggaggattttctgatgaaggcccgcacgcgcgccgccgtcagcgcgccggtgctgggaaccgtctatgaggcatcccaggcccaggggtactggttcgtcaccagcgagcaactggggggggcctccctccagtccatgctggaccgcgggcagaccctgtccatgaaggacctgctgaaagtgattgaaacggtcggcggcatgtgcggcaggtatgaacgcctgcaaaccgccttcaacgtcatggagccgcgccacatcttcctggatgacaaatccgccgtgcggctgatgaatacggccatgcccggcgactttcatgaagaaatatcccgtgcgcagatgaagcgcctgggggccgacctgctgcccctggtgacgccggacgtgcccggaaccacccgcatgcgcaccctgctggaatggatgcgggagggccagaacggcaagccgatgcagtgggaccaggtcatggagctgattgccgcggtccgcgaacagctggggctttcccctcgcgccaccacgcaccgctataccgttcccgtggaaccccgcagaaactccggaaaatggatgctctgggccggaacgggcctgctgggcgcaggaatagccgcggctgccgtttttcttttattcccccgggaggaagcctccacgcctgctccgcccccggcgccgaaacactatccggatttctccgccagcgaccatacggaagtccgcgtgaaccttcccggcggcggggaactgatcgtgggggcccatgaaattaccctggaatcctaccgcctgtttctggaccagtgggcgcgccttaccccggaactgagggaggaatactcccatccggaccagccggacaagcagaccgccacccatatccccgaggactgggaagccatgtggaaggcggcctccactccgggaggcaaatggaagggcaggaaaataacgccccgctcccccgtcgtcaacgtcaccttctgggatgcctgggcatacgcgagctggaagcccgtggcccccggagagccgcgttaccgcctgcccgcgcgcggggaatggatggccctggggaacatgctggaaacgggtgaaaagggagacaagaccctggtgattgacagatacagcaatgattacgacttaaagacgggcatttgcggcatggcttccggcgtgatggaatggacctcttccatggaaaaggaccccgcgcgcgtgaaggagccgccgggcccggtggcctgcggcggggactggaggcagcccggcatcaccaaccgggtggaatacctgcgctcccgcggtgaaagccgggacaacctgggcttcagaatcgtgcgggacgtccgctgacctgtttaaaaacacatactcgacaaaccaataccatgaaacacatccttgcaatgctgctgctggccctgatgggggcgtccggggccctggcccagatctacgtgaaagtagttccggaaaagaaaaccttcctcagcggggaggccatgtacatgaggctgaccatcaccaacaactccggcgtgcccgtggaactgaaaagccaggaatattcctcctggctggacatccatgtggagcactccaccgcgggcgcggaactcccccagtccaaattcgccatgttccctccgctcaaggtgccggccggcatgagcgtctcccgtaaaattgacctgcggcacttctatgacctgtcacgtgaggggaactaccatgtgcaggccgtcgtgaaaatgcccaaccagaaggacatgttcgcctcccagaaatccctgttcgccgtccggacgggcacgcccatgtggtcccagaccgtagccattccctccagcgccaagcggtgcaccttctccatctgcaccattgccgtgcgcggaatccagaaactgtacgtgcagacgaaggacccggatacgggcgtggcctacaatgccgtatgcatcggggactggctgggcaccacccgcccgcagtgcatggtggacggcaaggcgaacgtgcacgtcttcttccccaccacgcccatgctgggcgcgtattcccgcatcaactaccgcggaaccatggaaaagctccaatactacaaaaaagtgatgggcaccccctccatggtctttctcccggacggcagcgtgcgcgtgacgggagccgtccattatgaccccaccgtgcagcccaagacggtgccggacgccgcggacgttccgggcatgtaatccgcccggtgttgccggttgttgcgcgggaggaaaaacaagaaaaatggacgccgggccgttccctgcgccggaaaggagtggaagacggttcaggaatccccctgcggcttcctttccggctgcggcgcgtttttcaggatgcgctgtacgctctcctgcaccacgctgatgggcagggcgtaattttccgcccggttcactctggcgatgttcatgccgatgagctcccctttcaggttgagcagcgggccgcccatcagcgtatgccgggaaggggtgtcatgctggaggaccatcggaaaatcatccctgcgtttgctgaagcccccgctgatcaggtcgttggaatcctcgggagcgtcttcccccagggcctgccgccgggagcccagcgtgatggcgtaggaaagctttttgcccttgcgcctgaccttcagcgtcactttttccccgatctccttcttggacaggatgggggaaacggcttccagcgtggtgatgggcgtgccgtccacctccagaatctcgtctccggccatggctcccgccgtggcggcgggaccgtccttgacgacctcctgaatggagcagggagttccgaacatcacgcccatgtaggccgtgtctccgttcgggatgggccgccgcgccgcgctgagggtgcccagctgggggcgcctggaagtgcgggtggtggagccgttgctgaccaccatcatgcccatggcggcctcattgctgacggggccgggggcgggcaggctggcggcgtccaccttcaccacggcaatgtccgtggccgggtccgtgccaatctccttgaaatgaccgtacttggaggaacctatccggaccaccaggttctggtgggagtggagttccgaggccttggtggcgatgtagccgtccgtactcagtacaatgccgtaaatcacgacgtcatggccggaaaagaaaaccgcgctcaaatcctggagccgttcccggatgggctcaatggttttcagaacggttttcccgttgatgcgctgttcaaaatccaggctcccgttaaacccttccgccagggcggagggaagaagggaacaggccaggggcagcaggcaggcgcaggaggagagtttcatgaccatggagggaaaaagctagccgtcccgttccggtgacggaggcaggggggcctttccgcctgcgggagattccatcagtgcgtcgaaatccttcatgggaacgtggagattgtcttcaagcccggaacccacccggctgtgaatgccgatcaattccccgttcaggttgaaaagagggccgccggaatccccgcggatcagcttgcaatccgtctgaatgacgccgtgcttgagggaaaccaccctccccaggcgcaccatcgggccgcgtttctggtccaggccgcctccgtgccccagcgcgaacacccagtcccccacgcggggcagtttctccgccttctccacgcggggaaggttcttgttcaatttggtcgtgatttcagccgttccggcgtccgaatcgctgttctgcgccgtggtttttcccggcaggcgggtgccgtccggcaggatgatcttgagcacggttccttgtttgtcaacgacatgggccgctgaaaaaatcaggcctttttccgaaaccagaatgccggtgccgctgccgttgttcacttcaatgcagaccagggcggggagcacccggggaagcacctgctggagctggtgttcaatccgctggaggtcctccacggactgcggcgtggtggaaaggattccggcgctgtcggcggactgcgcccgcgcctgcggagccagcagggccgctccgcagagaatggcggaaaaacagggtttccggaaagccgtgttcatgattgccggggactactgttcagaggcgggagcttccgccttctgctggtctgcctgtccgcctcccaccagggaatcgtgataatacacgccgatgaacaggcccgccagcgtgatcagggtaatgagcaattctttcatgccgccacagcatagaatgtgtctttcattctgacgagagaatttcattgataagccacacattgatgcagttctgcggaaagaggacggatggcgtatggggaaattgccaaaataaaggttgctttttcccgcaacgggcgtataaacctccccagcggccggttccggtccgctgacccatccaagcggatgtagctcaggggtagagcgcaaccttgccaaggttgatgtcgtgggttcgaatcccatcatccgctccaacagtttctgtaagaaaacctacgcaaaccttgatattgctagggattatgaataaagtacacgtaagaaaacttacgtaaaccatattacaaaacccttacaggaaatattacaggtatgagcaagcctttctacagcggccgtctgtccatcaacaaggaaaaatcttctccctattggatggtaacattccaggggccggacggcaagatgcggcggcgctccaccaaggtgcctgtgaatggcggagagttcgagggagaccgcatcacatccaagctggcggaacggctcgcctaccagcggggcgtgcagattgcctgcgcggaggcggaagaatatcaggcgcacaataatgtttccgtgcgtgcctggtgcgacgactacgtgaggcgcaaggcggcgctggtgtcggaagatacggcacggaacgccaggacggcctacaagcatttctacgcttatttgagcggccgagctgatgccccgctgcgcctgatcaccaaggcggatatcaagggcttcgtggctgcacgccgtgaagaggtgcgccagaagacagtgtccaaggatttagccgccctttcccaggcgtttacggatgccgtggactccgatgtgatcgaccgcaacccgtgcgtcggtgtttccatacctccggaccgcgcgggcgagaaactgcacaaggaagcgttcacccttgacgagatacgctacatgattgagcatttccctcccctgtggagttccgcggtacgctgctcatttgagaccttcgggcaacggctgggagacattttgaggttgaattggaatcagtttgactgggagcgccgcgtcgtgcgctttgacactgggaagacggggcgctggatggaccagcccatgagggagggcttttaccagtgggcgctcgcccgctggaaggaagccggggaaccggcggacgcactgcttcatgctcccctgctggccctgggggatggagcttccgcccagttcgggttgttattgagaacgcacggcatcggcgtggtgcatggagcggccggcggccgcagacggaggatgaacagcaagtccttccacagcatccgcgcgacggccgccaccttgttgcaggcttccggcgtttcccaggggctggccatggagcttgtgggacatgattcatccgccgttcatagcgtgtacatccgcccctccgcggaccagttgcgttctgccgcggaatccctgccggaactcctgccttaaaaaagccctgctcccagatcaggaacagggcttgcaggtaaaaagccgggttgactttacgcgcccatcaggcgcatgtacttggttcttacctcagcaaagcgcggatcgtcggaattatggaaggctgcgtaatccgggtgttccgggtcgtgcatcatgcgctgggcttcgccgcgggcctgttgctcctgtcgtccaggtggcacaggaagagccggttcatccaggagcctgcctaccgcatccagaattttgtacatggccggatgatcggcaatgcccatctcattgaacacgctctgctcgaccccggccatgcggcacagacgccccgccatctgaaccgctcgcatctggcgggcgtcgctgtcccggccccattcgctgtccagcttgctccacgcctcattcatggctgcctcatgggcctgctgctgttcggccgccttggccgccatgcgggtgtccatatccttgatgaacgcagaaagcccctcaacgggcagcccgtgagccttgccggtttcggtcagtagattctgcagcgtctcgtcaccagtgaacgtttcgtcaaaggccagcacgtaatcctcctggacgggaggttcggtcttcccaggctccggatttgccggaggcgggtcagccggtggattggcgggagccgtgtttggatccggcacggggtcggccagactggggcggccaggcgcagcgggagggttaggattcccgccgcctccgcctccattatcaggggcttcttcacggaggaatcggttgtggtataatctgaataaggacatagtggttactctgtggtttcttcttctggttcgttgttgttgcctaccaccatttcgatgaacaaaatcacctcgcggtaggcatctcggcgcatggcgtcaagggggtcgtaggatccagccgccccctggaaacagggaaggtcggtctggaaatgtttcttcagctccgccaggacttccggattcctgaaagcttcccggaaaatccttctgcggtgcttcatattctgctcatactctgcttctgtcgtcttcatgctgtctgtaaagcctgcgcctgggcattattcctgtttgccacggaggactgttccgcaagggcagcctgcgtggccgcttcctgctgctgttttctatcagtttccttggccttcatttcgtcttctgtcgctttacactccatcggagcgcccttggaatcgtaaatcagctctccggccttgttgaggttcacaatatccagcaactccggccgtccggtcatctgggatagggtgccgatggattcgagggccgtcatcaagccgtccgtctgcgtccgggcaatcgcttgggcgatcttgcccataaacagcacctgtggaacagccaaacgcgtggggactccccggcggttggtctcaaacacgcctggcaccgggtcgggcagcttgcctgcgcgatacaacaatgccataatcctctggcacatcatccggaaatcgctcacgaataacgtgaaagagggggtaaatccaagcaccttttcagcttcccgggccgctacttccgtggccgtcatctggcggtcaatgcgggaaactgtttccagcatgggtacataaaaagcttcttcaatcttggcgtacagtccgcgcaggtattccagtccaatatcatactgcccttccctgatttggcggtcgcgggcgtcgatgatgtcgtctttccgcttgagcagtttgatggtgtaactgacggcgtagacaaggacgccgaagcctccgagggatccgactgccgatatcgccgcggacagcgcgggggcctgattggcggggatgttgtcccgcgtgaagcgtcgggactgaacgaagccgttgttgtccgggaatacggcagtcatggtcaactttccccagttgccagggtcggggaactgaaattgtaattgtacgttgttcatgattctgctggttgttcgggttccgtgtacggctcttccgtttctgtggtgatccaactgcgctggtagggctccaatccgaaacgcacataggtattactacctacgccgttaatgattgttggagactctgcgctgataactcctccatacaaacctgcttgagcgtccagatagataataggggcatagagcacatggtaggtgtcccagcacctgatgtctgccagcttgataatcgtatcattggtcagcccccccattaccaaccagactccggcggctaaagcgtctccgtgcccaattttggattgagcaatgacaactcgataggtggctgagcatggattgctgttgctgtcgtaattcagatcggataacgtcgttcgtaccacatatctcttgggaatgccgatgccaatcagctcgcgcacgcgggccttgtagccattatcataatagagagtcacatcaaccagccgcgttatatccggcacactgccgaccacagggcggagccgaaaatcatctatgcccgcatccggatattcatcaaattgtccggaacctccgatgatcatggaaattttaaatgcgctcccatcagaccccccactaaatttaattggcagagaataccccgctatcttgctataattgccgcccccgagcgcaccagcagacggcagtgtgacggatgtccggaccttggccgccaagatggcctcacagtagcagccaggagcaatatgattgattgccaccccattagtagccgtgcaggaggatgtggcccagtaggtgcgcgtctggtgcaacatggccgtgtgggccatccccagggcataagcccggctgacggctgtggtatctgtagcggccccggcagccagcgggatattgatgccgccgttggcattgacggtgccgttcgcagtcagaccgccagcgagcgtcatgttaccagcagcatctacctgcgggatggcggcaagggcctgctgggctgcggtggcggagtcagaggcattcttggcggaggttgccgcattggtttccgccgtcttgattctaccttccgcgtggtctatttcctctttggcggcttctgtccgttcgacaaggggcgtgattgtctccatggcttccgcctgggccgtctgcactgcctgcacggcttccgtctttgccgtttccacggctgtgacagcagcgccttgtgcgctggctaccttgtccgtggcggttttctgcgctcgccccacagcaagaacggaatcagcttgcttggcttgtatgacggtaacggcttcctctttggctgcgctgatcgtctgttctccgttgctgaccgtctgcgtaaaatctgaaacaatcccttccacagccgtcttagcgtcattggcgctcctggcgtcacgggccgcatcagcggcggacgtattggccgccgtctcggaattagaagctgccaccttggaaacgtaagcagaatcggcatagccttccgcttctctggcacgttccgcggcggtagtggctgctccggttgccgttgcggctgcctgactcgctgtgtccgcgtccgtgcgggtactggaagcatcctgctgcgcctgctgggcggcgagggaagccgccgtgttggaaagccactgcgccttgatggtcttgcctgcctcgataggaatcgcaatgcccatcaccggaatatcgtataccgtggaagcctcaatgggggggaccgactccacggcaccgatgtaacccgcaaatagccgtaaatcctctccggattcgtcctgggcgtggatggcatacggccagcgcccaataggcagggcgggaaaagtaagctccaggtaattctcctgttccccgtgggtaatggcgattggcaaatctccctgctcggttttcaccgtgcctgtgaaggaaacgccagttaccgggaacggagattgcgtcacgtcctcgtgcaaaagccagcctatgcgcttggcatagccggctgtcgtggacaaatggcgtgtaatccccagaaaattaagcatgcctccttcatgaggcaaacccggaaaaatctcaagttgccgagtgtcactactttttgccggactttacgggagggtcatacgggagcgcggcaagaagactcataaagttctctcctgcatctacttccatcttctccggtgcataggctccatccatcttgttcagctcggcaatggctgcaattttcgatggcatcttgaatttcatgccattttcatcaatggaagactcctggcaaagctctgacgtgttgtcaatttcaccgatgggagttgtcacaacacgggaaagccattccatgcgttcctgtttggtcagcacggcggatttgttcaactgggcgttcaattcgtcaatcattcgcacaatttcagcatctttggacaaacgggaagccgccttacttgccgcctcattgctcatgtccttgcgtttgtatgccttacggtatgcgtccgccttggacaattttccatcaaccaggagccttgcaaactccttcttcttctccgtcgtcctggatttgttaccctctctcttcataccaatattttaccctcctgtttttcggcgtgtcgagttgccgagtgtcaacgtttcttgccgatagcatcaacctgctgattttgagtcctcgaaactctccaaaaaatcacgcccctgcctgctgatataaaacacgcaaggccgtgtgccggttctgatcacgtcgccagcctgaaccagataatccaggcggtgggacacattgctggcatccaagtggcatctggtggcaatctcccgtgacattctgcctggatggtcgcggacttccatcaggataagcaactgggacggactgaccttccgatggataatatttcgcagtagatttttatgttctgtggtcatgcctcacctcccaatcccatttcttttctcaattcccggatttccgccgccgccgtgtcagtgtccacgacgggcccttctggttgccggggttcttcgggtttgagtttctttttgggccgtggttgggcccgatcccatgcaaatgctttctggacgatttctccgaaggttttcatgaacagcagcctgtccggcggataatcccacttgcttgcattggcgggagctgcggccagataccgggatacgcagtccttggcggcatccggcacaacgcctccaaggcttttgtgcatggcaagcagggcggagcgttccatccccgtgaacttgcttacgtcccagccgggccgcagcgtcttgacccactccgccaggggctgcagggcaatccacgccgacgagccgtaggagggcgaagtgcccggagaaaggccaggaaaggattcatggggggtaggaggcagaacagaaacagcgggcggttcttcccccggtgtatcgtccaccgtagtagtttctccccctataatcccggtccatacatccgcagcggaataagccgtcagcttgaccaccgcgccgcgtcccctgttgtagatgtccgcccccaaattcacatcaaaccgcgcccctgcaggaagatagactgtccgcatcccgcgagcatccagggcaatgcgcccagtctgctggggcaccgtccatccaaacctgactgtttgcccgtcggccagggcatccgcgggaatccccctgggcgtcacatcaatgccggccttgcccagcgtcagcatggcggaagctcccgtcatctccacgttatccacccacacacggcttgctttgatggacgatgccgtactggtcaggtaatgccgcagtgtcggtgtggcgggaatggtgaaccgctgtactgtgtccggcctggcgccggaacgcagttgcagcaccacgtctttcttgtaggcatccacaaccagcttgttgccgcaggcgtcagcggggaacccctggctggggtcggaagcgttggaaagctgggactcatagagcatcaggcgcaggtagcattcttcgcccgcctcgtccccggtaatctgtaaattggatgccgctccaatcctggaagtggaggaaccgagcagctgccagtcctcttccggatagcggcgctctatagcgtaggttccgtaccattctttattgcaccagaacttccacgtgcccttgcaggtaattgtgttggaatggcaaatgacacccttgtggaaatggtccgggtaatccgccggagaggtgaggccgtccacgtagtgggttgccccgttgaaatccttgtcgcatgtccaccaggaccagtaactcccctcattcacgcacagcttcttgccggcggtgaaggcactggccgtggtaaaagccttggcaatcacccagccctggcggatgaccgcccctgtactgtacccggtctgctggggcaccgtcacctggatgcgcatcacgtccccttcgttggtgacggcatcgggatcctcggaatgatcaccgaaagaaatcctgtagcatccgtcatccagcgtcagccgaaccgggaaatcccggtactcctcataccgccaggggcgggccttaaactcatagggagccagggaaaacgtgccgtcgtcatcccgcttgagaaccatgagctcgtgtgagggacaagccagaaacagcatgctgttgacctgcttgtgccgcagagatgcaatgtcggccgccgtccaaacggaaggaagggaagccaccacatcgccatcgacggacaagacgcggagcagggctggacttacctcgacaagataacgatcactggcggaatacacgtaggacaccatcatggacccttccagcgcggctattaccctcttcatgccgtgccggcgggaaactcctcccgtttgagaaacatccacattctccaataccgacgccccccgatggtatacatccaaatccggacgcgcggcaatcccgggcgaaacctcgcccccgttgaaggaaatcctcttcatttgccttccaatataaatggagggtgaaagctggcgcaagttgccgagtgtcactactttttgccgggaagagcgaaaaagggccgcccccttgcagggacggccctatggacaaaccaacgaggaagaattactgaatgccgtaggcaatggcaaagacaagcttcttgccggcggttactgccggcgtgccgcccaccttcgcgtaaagcatcgtcgtggaatccatcggcttgccggaaaccgccagggaacccttcgtcagctggtaggttccggccgcggttacggtcagggaggcggaataagcatccgccatgtcctgcgtgcctacggtcagctgcagcgtccccacaccttcggaaataatgtgggaaagctgggggagcacgcgggcgccgcagggaacattgcagatggcgatcaggtcatcggccgccacggatgcgggcatcgtgaattccgccgtagccacatggaccccggctctggtatggatggccgcaagctgcggaactgttggcagaccgatgcggtccgccagggcgagctgtttttcagcaatggttgtttgatacgttgccatgatgatttaatgtaggattgaatgttttaaacaaggggcttgcacttgatctgcaggaaggcttcttcgcgcatgcgagtggaccccatgatggtcttgaggccgatctgaatggtatcttccttgtcggttcgcttctccaccgtcaccttgttctgcttccaggagccgaaatacagggaattcttcatccacatggggcagatgatgtttccttcctcgtcaatcggcagattgggagcgatgacgaactgaatgcccatgatggggtccagggtgccgttcgttttacgcagggatgcaaagccgaaatcggtcttctgcaggcgctcgtcattgatcagggcttcgcgcatgcggggagtgatggcgcagcacacctggtcgccgtaggcgttggaagcgtcgtcgaggataccgttctcctgcaggagcgtaatgccccggttgagcttttcaatcgtcatcgggcaatccttggccgtgcttccggtgtggttgaacgggccgtttttgaggtgggctcatgcacgtttgcggattttaccgctcctccggaagatcattatgcctatgcccataccatacggcaaacaggcaatgccgccggcatttatatcagtcttcaaatcgacagtgctctgcgcaaattccgggtgaaatatcattccaggctctcgaattccgccgtggctccgggggtgctgagcgtttatgaatgggatatgccggaggaattttacaatgttaaaatggcacgcctcatttatgcctaccgtcaccagtatctggacgtgtattacgtgacgccctcaggagaactgaagcttatcgccgctacgccggcctcacagggttacgccatcactgaggcgcagctgctgtttcatggcgacagtgaaatttattccgccatagcgcacgtggaagataacaggctgagggactggctcggcaagcagccgcttccctattcccgttccaaatgggttgagcgcaattcgaatgctcctttatccggtatcgatctgccttctgccgggggaagctcttcgttgacgctgaattccggcgccggttctgcatggacgctggtttcaaagcccgactggctggacgcaggtgcggagcattgggagaacggcgctgtcgtgaccgtatcagccggagctgcggaaaaaacgcggcatggctcgctcatccttgcgacggatggcaaccacgcggcggccggagttaaagcctatgaaaaagtcgtcatcacgcaaactgcccaagcgtgaggcagatgcaaataacggtcatggcctgctctgggctgatgggcagtaacgtttgaagcggctgtccgcatcaaccgacagaggcgaacattggttcgcattcagacgggcggcttttagccgtccgtctttttttggagtacggaagatgaaggctcaaggctgcggttatttttccgtttcaggaaatgcttcgccaggaagctccggacgggttcatcgtagaacttcaggcagagccaagccagcaggatgcttccgatgacgacggccagagcgccggggagggattcagagaaggagaggtctccgtttttcacccacgcgtagtacaggtagatgaacgggtaatgcaccatgtacagggggtaggagattctgcccaggaaccggcatattttatccgtatagggatcagtgatttttccggaagcgccaaagaggaggataagggggaagaagaccgcgaagcacacggtttcatagaggctgttcatccagaaggcgtcttctccccccagccggggaacggccagcaggatggcgagggaaatgccgcatagccagaaggaacccttgatgttgacgggcttgaacaggcggaacagaagcagcccggcggagaaggagtacagcaggcgcagggagccgcctgtccattccgtcccggtcatggcgaagccggagcagatgtcaccattgggtccccagaagctgaaggaagccagtccgcatccggccaggataaccagcgccgccagggagcgcgtggagagtttccggatgaacagcgcatagagaaggttgccgatgtattcaaagaatagcgaccagcttggcccgttgagcgggtacatctctcccagtccccggatttcaaggccgggaggcgacggaatcagcaggacattgacgaaggtggcgaccagtagggagatgaccgcaacctgggatacatcccatacggaacagccctggaaataaaagatgagcgcgccgatgaccgctcctatcgccaccatgggctgcaggcgtatgaggcggcgcttgatgaattccccggtcgtcatcgttttccagcggttgtcgtaggcgtaaccgatgacgaacccggacagcatgaagaagaagtcaacggccaggtagccgtggttgatgatttggtccacatggctggtggcgtatgcttcaaagatatggaaccacacgacgacaatggcggccactccgcgcaatccgtcaagaatgtggtagtggtgtttttcacttccgggtgggatgggagagttctgtgggttcgacataggagaagctgttttttgatgttgtttttgttttgttttgagagagtttccgccatatcagcccattccccgctacggatagccccgtacaggggagaaatcatccggaggcgcagttttcgcgttacctaatcaaataccattccaccctgcaagttctttcatccattgtcctttatcatagggctttatagggggaatagggggaatagggggaatagggggaatagggggaatagggggaatagggggaatagggggaatagggggaatagggggaatagggggaatcaccgccgggcagggagggaagacggctttagaggcgggggtggatgggtgatagggagcgccttttcctgtatgctggggcagaaggctaccccttgcggtagttcgcgagcgtttccacgtatattccggagatgctgcctccctccatgggggcaatatccttgaacgcgggattgaggggctggagcaggtattccgtttttccggtttccgcatttttcctccggatcagttttttcagggtcactccgcgtccgtcgttgtattccacgatggttcccggtttcgggacgggcggggccgtatggcgccgcatgactaccagcgcgccgtccgggatgaggggttccatggattttccttctacgcggaccacgtattcgtttttgcccaggggcctttccatgtagatggtggacgggacggtatcgctttccgaaagggagcccgcggcgatgttgccgacaatctgcgtgctgtattcgcgtccggcatgtccggcaagggacgggagttgttccgccaagggaatgaaggagctttgccctgtccggagctgacgcacgtccgccgcttcatccgccagctcggtcagccactggcgcaggggcatgcccttttcagaagcggccctttcatatttcctcatgcgttcctccgtgatttccagcacaaggcggttggtctggatagcctcattttccggctgagccggcccgtattgggacatcagggagtggattttcaaaatggcgttggaggggaaggggccggagggggaaagccagttgttgaccgttcctttctccgtgccgcattccctggcgagccagtcacggtcctttccgatggctttcagccagtttttcacgtccccttttgtcggtgtcatggcttgatgatacacgattttcgtgaattgtcgatagaaagaagtaaattaaatccgtgaaaaatatgttgactgattaacgaatatcgttaaaaagaagtcatgaagtacatgcctttggacatttccatgatgaagccggagccgttcccgtattccgtgatgatgaggcccgacctgcatcccaaaagacagccctccggggaagaaggatggcgcggccgcctgggggcagtctgcggcgcagtgcaaacgctggtccgtcaatgcagggcaaaggcggaacggcagaagatggtgatgaccgttctttccgtcgcgggggcttgtgctttcggcctgttggccgtcggcgtgttctggctggccgtagaaatggacaattccgatttgcaggcatccaagtcttcctgttccataaggccgtaagccggaccctggccggagttcctgagcggttttttgtggcgccgctcccggaaataaacagggactgcgtttgatgaagccgggtccgttttcccccggttgaaatggcttgcgaaggcatgaaaggttccagtggggaaccggagtccggatgagcttccattgttgcggagcttctccgtggcggtggggggaatgaatagaaatcggctcttttttgaggaggaaacggcaggggttaattatttttttgtgtcggaaatatttggtaataagttatttgaaatgaagataaaattatttttaagatttttctttcattagagcaggtgtaaccttttagatgataggtagtgtgttgcttcccgtttccggacgggtgttccgggagtccgggaagcggcctttaaaccaacctgtcatcatgtcaaaccatacccattccgcctttctcatgcatgtgcccacccggcttcttttcggggccgggcaactggagaacctgcatgcggaagcattgccgggccgcaaggccatgatcgtcatttccaacgggaagtccacccgggccaacggttatctggaccgcctcacggggcaactggacaaggccggaatcgcctgcgccgtctttgaccgggtggagcccaatcccctgaattcaaccgtcaatgccggaggccggttcgcgcgggaacacggctgcgattttatcatcgccctgggcggagggagctgcatggacgccgccaagtccatcgcgctgatcgcagtgaatgacggcgattactgggattacattccctccggcacggggaaggggaagccggtttccaacaggcccctgccgatcgttgccattaccaccaccgccggcaccggatcggaggcggacgcgggcactgtcatcacgaacgagaaaacgcatgaaaagacgggctttgtccatccggacctgtttccggcgctttccatcgtggacccggagctgatgcttaccgttcctccgctgtttacggccttccaggggtttgacgccctgttccacagcgtggagggctacgtttccaacggcacgaacctgatgagcgacatgtacgccctggaggccattaagcatatcagccgctacctgcccagggcggtggccgacggctccgacctgaaggcccgtacccatgtggccttcggcaataccctgtccggctatgcggaggccacgggaagcaaataaaaacgccggggcagccccgcggtccctccttttcccggggagagggaaaggggcgttttcttcctgagcgggaacatggaagggccggggattccaacggaattcccggccctttcttttttacggttttgagggagcggcctattcctccggagcgatgttcggttcgctggcgctggcatggttcagcggattacagctgtccggcctgcggttgtccagcaggtcctggtagaatttcttcttgtatttcaagacttccatctgttttttcaggatgcggagctgctcccggaggcttttctcctgcttgaaaatcagttccgcgcgttccggaatggtggtgtccccttcctggcacaggtcaatgtagtgcttgacgccttcaatcgggaggcccgtcatccggaggcagtgaaccaggcgcagccagcccagggtgtagtctgaaaacatgcgggcattcccgccgctgcggtccacgtcagggatcaatccggcgttttcataataccggatggtgtaggcggacatctccatcatttccgcaacctgtttcacggtatatttgggagtgcggtcataggaaggccggtaggagctggatgggttcttctgtgtgatcattgtgcagttgatggcttacagttactctaatatacttccaggcgcggaaagacaagcgttttgacgggattcagggagaggagggttctgaaaacgcatgaacatccatcagtgaataacatgatgataacatgtgaataaacagagggacgtttttcatctctgttccggagaagaacggcggaaagaacgcggcagtttttcttccggcggaagagtacgcctcttttcatgtactccccggactgcggggaaagggcgcaggatcgccgggagggccaaagggtttgacggctggcggcggcgcattacaatgaagaccgttccagacaagacccccgccatgattattgcctccctttccgccgccgcccgatacgagaacctgaatccgctgttcaagcgggcttttgattttgtgaggggggctgatccggcttccctggagccgggaccccacgtcctggaggaagatgccctggttgtgatggtgaatgaacccgtgatgaagaagccggagaaggcccgcatggaagtgcacgacaggttcatagacatccatgtgcccctcacccgggaggaaggttttgcctggaaggaccgcgcggccctggaaaagccttccgagccgttcaacatggagaaggacgcgcagcattacgacgatgcgccggatacctcttttaccgtgaagccggggcaattcgccgtctttttcccggaggacgcccatgccggctgcatcggggaaggggctctccgtaaactggtgattaaagtcagaacggcctgacccgcattccggaaagatggtccggcgccgggacaggccgttcctccacgcccgctccagcttgcctgccggcggggcaatcattcaatttattcctcgtcttccaccctcgcgtcctgcttggggtcctgcggagcgttttccggaatccagacggccacgttgccgccgtggacgaggaactggccgttgccttcctcgtcaatggtgacggtttcctccacgtttccggtggcttccttccaggtttccccggcgtgctgcttgcccacgttcatcaccttgtccccgtcctctccgttggagatgagcacggccacgccggaatgcgggtggtcgccatctcccacgcgggtgaagccgatggtgttcgggtggtcaaagtagtagttctgctccccgaaggcatggtttttgcggatttccagcaggttgtcgatgatgccgcggtgcatgggcgggttgccgcttacgccgtagtagtctccgtagaagatgcagggatagccttccttcatgagcaggatgagcgcataggcggagggcttgaaccagtcttccacggctgattccagggagctgccccactgggagtcatggttgtccacaaaggtgacggccagcgtggggtggttctggaccagggtgccgtccagaatcttggaaaggtcgtaatcacggccctgcttggaagcctggtacatgttgtagtgcaggggcacgtcaaacaggtctaccttgtagcgttcctccttgaggtattcgttcagggagtcgaggtcctgcttccagtattcgcccacggcgtagaaatcctctcccctgtccttgcggacggcggccaggaatttcttgatgaactcgtcattgatgtgcttgatggcgtccagcctcatgccgtccaggtccagttcccgggatacccagacgccccatttttccatttccttcaccacttccgggtggtcgaagtccaggttggcgaacatgaggtagtcatagttgccgttttcttcgtccacgccctcgctccagcttttgccgtcccccatgatcttgaagatggcggtcttctccgtagcggcgtcgtagtccgtgccggtgaagtggtaccagtgccatttgaagtcggaatacttgtctccgcgaccggggaagttgaagccggtccagccttcgatttcgtaggcgtccgtgatttccttgtcccggttctgctggtccacttccttggccatgaatttttccgtatagtccgctccggccttgtggttcatgacggcgtccaggtagacgcccacatggtgttcatgaagggccttgatggcgtcctggagttcctgcttggtgccgtatttggtgcggaccgtgttcttctggtcgaattcccccaggtcaaacaggtcgtaggtgccgtagcccacgtcgttttgttccttgcccttgtaggccggcggaatccagacagctgtgacgcctatttcctccagatggggggcgtcttccttcagcttgttccagaactgcccgtcgttgggcaggttccactcaaaatattgcatcatgattccgtttttcattttgtcagattccttgtaaatgtcgttcgggttgttccgccttcaggaggccggctgatggggaagacggttccctggcgtctgccgggcggggctccgcatgatgatttcacacgaagccgtcaacaagatagagtccttaaagcgcggcgcgttcggcatactgccggtgttatgtcccgcaaaatgtcagggagaacgtgtggaaagctggaaaagaaggctttccgccaaggccggactgaacctgcccgcgagccgtcaggagtgaaactggcccttgctgctgctggaaaaacgagcgtcagcgaacgagtgtggaaagagagggcgcggcctttgtccgcctgttcattccgaagccgcaggggcctgcggcgctccctggaagagtttcacgcttcagccgtgctgtggtccaggtagtgcctgtttttcagccggtagtatttgaggaacctccggatgaagagcagggtgacgatgaaggagagcacgtccgccagcgggagggaggcccatacgccgtcctggccccagaacctgggcagcaccagcaggaacggcagcaggaaaagcatctggcgcgtcagggaaaggaagatggccagacgggccttcccgatggcctggaagaagttgccgatgatgatctggctgccgatgagagggaaggccagcacgcagatggtgaggccgttggccgccaggctgatgagcgcggcgtcatccgtaaagagtccggcaatgccgcgggggaagaggacgcaggccaggaagcccagcgtggtgaaggaagtgcccgccagcacgccgtacttgagggtgagcaggacgcgccccggcttcatggccccgtggttgtagccgatgatgggctgcatgccctgcgtgaggccgatgacgagcatggcgaacaggatgaggatgcggttgatgatgccgtaggcgccgatagccaggtcccccccgtggtccgcaagctgcctgttgatggcgatggtgaccgcgctgccgcagacgtttaccaggcacggagccatgccgatggacaggatgccggtgacgatggccttgcgcagttcccagatgccgcggcggaagtggaccgtgctggccgcgtccgagaagtggagcagcacgcgcaccatgccggtgacctgggcaagcagggtggccagggcggccccggtgatgccccatttgaaccagaagatgaagacgggcgccaggatgatgttgattcccacggagagcagggtggagcccatggcctttttcgggtagccggtggccctcatcacgtggttgagattgaaaaagacgtacgtgacgggcagccccagcagggtgacgagcatgaagtcgtacgcgtacgtgagcgtctgcccgctggcgccgaaggcggtcaggatttccgtcaggaagagcagtgtgggaaccaccagcaccacggcggcgatcaggctcatgatgaggacgttccccagcgtgcgctccgtcccctcctggtccttcttgcccagccggatggagctgatggccgccccgccgatgcccaccagcgtgcccagcgcaaaggtcaggttcatgatggggaaggtgacggccaggccggacagggccagggggcccaccccgtggccgatgaagacgctgtcaatgatgttgtacagggagtacaccaccatgccggcgatggagggcagggagtactggaccagcagacgccatacggatgcgttttccaattctgcgatgttgcgtgactgggctgccatggacggacctccttttcagacgggaggcaaactataggaatgcgcggaggggttgtcaagctgtccacccgtccggggagcgggcatttttccgccggagctgccggaaaggcctgtttttgattgactggggaagcttttgggggttgattcctttccgcctttttccaggaacacgccatgactttttccgtttgccctttcctgcgccttgccgccgtctgcggaggcgcccttctgtgctcttcctgcctgcccatgctcggcaccgggcagatgctggcgggcagcagccttgcggacggcctgctgtccacctcccccctggacctggtgtggaggggggacatccggtcctttccctcctccgggctggacacgcccaggggcttcaaggtttccccggcggattcctattccctgctgatggaggcgcgccccggcattgccggagagtgggcctgctaccatgaccggaacagttactactgggcctttgtggccgggaagaaggaggaggaagcggggctttacgccgtgcgccgcggcgtggccgtgaacggaaccaccggggagattgaagaccaccccgccgtgcaggccgtccagcctccctccgtcatgtaggcgcgggttctggtctttttgcaaaaactgctgccgggagcccgttttccgggctgtggagcacgatagatttgacaggcaggggcctttgcgggcgtattattacccgcatgaagttccttttattatcgtttgcatggatgtgcatggcgtgcgccggggcgtgggggcaggatacggctccctccttcccggcgaacggagccaattacaggctgttcccggcggaccagccgcccctggttcccaggccccagcagctccgctgggaaggcaaggccattcccgtgcagtccgtgcgcatcctggccccgtctccgtccaggacttcctatccggagcagatgaagttcatcgtttccgaattgaagtcctttctggcggaccaccgggtgaaggtggctccggacggggcgttcgccgtcaagttcgtgaaaggggaggtgaaggccggcacggagaatcccaagctgaaggaggaggcctattccctccgcgtgactcccggcggcgcgctgattacggcggcggacaccagggggttttattacggcatgaagacgctggagcagcttctcctgcggcgcggcgggacgacgaccatcgccgcctgcgacatcgtggactggccggattttgaaatccgcgggttcatgaacgacgtgggccgcaattacatgccgctccccctgatcgcgcaggagctggattccatggcgcagcttaagctgaacgtgtaccacttccattttacggagcatcccggctggcggctggagtccaagatttatccggaactgaatgatcccaagaatttcacccgcatgccgggcaaattctatacgcagaaggagttcaagcaattggtggagtactgccgcctgcgcaacatcctgctgattccggagatggacatgccggggcacagccaggcgttccggaaggcgctcaacgtgaagatgagcgatgaaaaggccacgaaggccctggtggccctgatcaaggagatgtgcgccctggttcccaaggagaagatgcccatcatccacatcggcacggacgaggcccacggcaaggacgagcaggtgaacaatgacattctgaaggaatacatcaatgcggtggagtcctgcggccgcacgcccatgaggtggcaccccggcctgacgcctaagggctataacggctccatcctgcaattgtggtccggccgccagaatcgcggcgcatggcctgtcaacgggtccaagtacgtggattccctggagacctacctgaaccacctcgatccgtttgaaacggccatgaccatgtacttccgccgggcctgcccgttccagaatgcggacggcctgggcatgatgctgtgctccttcccggacctggaaattacggacccgcgcaaccaggttctccagacgcccgtttacgcagggatggcgttcgtttccgagcccttgtggaacaatccccatgaaaaggtgcagggagaccccaaccaggacgagtacatgaagtatttctccaacctgcccgtgcagggggacccgctgctgaaaggatttgcggagtatgaaaaccgcgtgctcgccatccgggaccgcttcttcgtgaacaaggagttcaattacgtgcggcaggccaatattccgtggaagctgcttggccccattcccaacggagggaagacggaaacggagttcgccccggaggcggacaacaagaccgggaagatgaaggattcctacgagattgacggcgttacctacgagtggtccaaggacgcctacaccggagccaccatcatcttcaagcattactgcgatttcccgacgctgttcaacggggcgaagatgggggcctatccccacaagaaccacacctattacgcgcagacctggatttattccccgaaggcgcagacggtgcccttctggatcagcggccatacctgggccacgtccgactggcgcaacggcccggcgagcgtccccggcaagtggttccacgcgaatcccaggttcttcgtgaacgggcaggagattgaccccccgcaatggaagaagccgcgcaacggcggcgtgatggtggatgaaaactaccatttccgggagccttccatggttcccctgaagaagggctggaaccgcgtgctggtgaagagccccagcaacaattccgcgcgccggtggatgttcacgttcgttcccgtgcaggtgaaccccaaaacgcccggatgcaacgtgaaggagtatcccggtctcaagttcgccgcggaaccgaagtaaagggcttttccggttgttcccgggcaaatgacaaaggcatgaagcgcgttccgcttcatgccttctttgtgtccggacgaagttccgggagagcgcggtgccccgtcaaagttttttccagggcagggcttccagcatcccgtcaaagcccaggcccgttccggcgggaacggctacctgcgggttcatgccgcccatctggtcaaggaaggggtccggctcaaacaggaggtgcgtgcagaggccgcagaggggaatttccgtgggaagggcgttgcggtagtagtccgccgcctggtaaacggcccagagctgccccacgggatggtccatgacggtggtgaacacggggggctcgtaaagatactccggcgtggcttcccgcgcgggtttgacgatgcggatgatgggcaggtccgaggaaatggccggctggtgctccgagtccgagcccatgtccagggccagcggcatgccggcgtccaccagccgttcccagctctggacggagaaggggcacgggtcttcaatgaaatctatccgggttttcaggtggtggggcagggatttccagaatttcagggcgtcgttttcattgaggcagccgttgaagtccagccgccagcgccaggcggggaccatggaggccagcatggtcagccgttccagagcggcggccaggttggggctggccttgatttttccagccttgaaccccttggattccatgatgcggatggtggcggggctgacgcaggagggcagtgtggcgtgactggcgggaatgtgcaggccgtcaaacaggctgacgcccttcgcgcgggcttccccgtccgtccgggcgcattccaaggcgcggatgcccagcggcagcgggcttcccttcttgagcgcgtccagttcctcctgcaacgtggcgtcccccagctccggccacggctggatgcagccgtacccgccttcatccgttttaatgagggctcctttcctgcatacttccgcggccctggcgttcagcggaccgcaggccgttaaagaatattcatggtaaaacacaactttaattcaaacagccttcccatcttttgtcacgatgaaaaaaggttttcattggattttggagggggaatggctaagctccgtgtcatgtacagaacattggtgttcggagcgggcggccgtgtggggagccgcctggcggcgcatctggaagaggaaggcatggaagtggtgggatgcggacgggacgcctgtgatttaaaggatttaaaagccctgaaaaacgtgctgctttcctccggcgccacccacgtggtgaactgcgccgccgtgagcggcctggaagcctgcctggatgatccggagacggcgcaccgcgtgaacgccatggccccggagatgatggcccgcatctgccgcctggagggcatgcgcttcatccacctgagcacggactatgtgctggacggcaggaggggcggcctgaaaacggagtcggacaagtgccgccccgtgaacgtgtacggagaatccaagctggaggcggaactccgcgtgcgggaggaaatgccggaggcgctggttgcccgcgtttcctgggtgttcggcaatccggagcggccctccttcccggagatggtgctgcggaaggcgctgaacggagaacccctctccgccgtggcggacaaatggtccatgcccgcgtgggtggaggatttgtgcgggtggctccgtttcctggcctatgaaagcgacgcgtccggcgtgctgcacctgtgccagtccggggaatccgtctcctggcacggttatgccgtgaccgctctgaaatgcgccgtgaagcacgggctgctgccttctttgccgcccgtggcggaacaaaagctcgacgaacaggccggtttcagggatgctcggccccggcataccgccatgtcctgcgaacggctcgcttccctgatgaagcggcccgtgaggacgtatgaagaggccatcgacctggccgtggcccgctatgcctcagatccaaccttcctctcccgcatttcatgaacgatttccgcaattcccgtgattctagcgattcccgccccaggcccgcctaccgggaccgccgctcccagccggggcgcccgcgcacggctcccaaaaagaacctttttgtcaacaagtcaccggagggcagtgaacaatggctcacgccgtgggtggagctgaaatacttcacgtacaatcccgccgttttcccccgcatgctcggctccgtgagcggggaaatagccccgggaagcctggtgcacgtctatgacaagaacggggaactgttcggctccggcttctggaacgaggccagccgcacgcccctgcgcgtggtgtaccacgggaaggacgccttttccgaacgggacctggacgccgccctggaatgcgccgtgaagctgcgccgggagattctgcgcctggatgaaaccaccaacgcgtaccgcgtgctgcatggcgattccgacggcttgggcggcctggtggtggaccgttatgcggatgtgctgagcctggaggtgagcacgctggccgtctggcagaggctggaccgctggctgcccctgctgcaccgcctgtgcggcacaaagcgccatgtggtgcaggtggatgagggcattgcccgcatggagggtatccgcgcggaggacgccccggaatcccccgcgccggtccggttggtgaagattgtggaaaacggcatcacttatgaagtggacttcgcccaggggcacaagacgggcttcttctgtgaccagcgggacaaccgccttaaattcgcctccctggtgaagggagcctcggtgttggacctgtgctgctacagcggcggcttttccattgccgccaaaatgctgggaggagcggcggaagtcacgggtgtggacctggatgaaaaggccatcgccatggcgaagaggaacggcaatatcaaccagcagcgcatcgacttcgtgcatgcggacgcctttgtgtacgcgcgccagatggtgcgcaacgggcggctgtttgacgccgtgctgctggacccgcccaaattcatcatcggcagggaggggtatgaggaaggcatcaagaagtaccatgacctcaacatgctggggctgcaatgcgtgcggcccggcggcgtgttcgtcacctgttcctgttctggcctgctttcccctgcggagtttgagcacaccgtcatcaaggccgcccagcggcaggggcgcaagctccagatcatggcgatgaccggccccggctgggaccaccccttcctgagcacgtacccggaaggccgctacctgaaggtgctgtgggccattgccctgtagggaaggactggatattcaatgtttccccgctctttacgaaagtaatgacttgaaaaagcacctgccgtttttatggcaggtgcttttgaaaggttattcttcaaaggggaacaggtgtttttatttctttcccttctttttaagaagccggtcatgttcaacccggtgcctgccctgatagagaaagtcggtttcaggttcacggccaacggtgcggtcaatcaggttgggaatgtcttccctggtgtatccggattgaagcaggaattcttctaccttggaatattgaccgggaaattcggagacgagcaattccatgaacactttttccagatgcttgacttcgtcttccaccatgacgtttcttgcttcaatgaaagactctccccacgctacatcattgataagaatcttaagctctctcatgctgagttgtttgagttttctcacctgttcttcagagagtttccggctttcctctgtttgggcaggcatatctttaagatctttataggctgcaatcctgtagggattcttctctccggcatttttaaactgtttcagaatacaggcgtaataggggagcagaagtttccgaatgaccgtttttttcaggggtggtttcattttcccggaatttcggaccagggttatatatttttccagatggccgcataccatggatttacggttcaggtcctccgcatcgtccatatcgacatccggttccgtttcccggtaggtcttaaaggtaaaaactggagccagggcggcgaggtagcaatgccagactttttcctttaactcagcatggatgttatcctgcgttgtcactttaaaagtgagggcatcttgttccatcttcttgtaaaaggatttgaaccgtttgtctttcagcatggcggcaagctctccgatgccgggggaagggtgtttgtactgctcaatgcagtccgggctttccaactcaggagcagccaaggcggaattccagccgattattggcaagacaaaacaaaggaataagcgtggcagtattttcatcaaggttttagccatcattgctgtttctttcaaatttaatattgaatttttcgacaatcgtatttgtcgtagattcatcaatggcttctatatgatatttttgattagttgtgctcaacagaatggtatcttctgcttcgcttccctctcctccatgtcctctatgtacatataatttgcatacaaaccaaaatttttgaggattatatttcgaattcttaattgtttctataatttcttcgataagacgattatcgcctaccatgtcataaaaatgatttttgtttccaacggaaccggcaagattacaagttttatgttcattcgccagttctggtttagtttttggaggcttggagttttttccttcccacatgaggcccccatcccgttcaatgattttgatctttttgaaactgacgttagtaggagaaagcgttaattgaataaagcctaaaaggccatgttcccctttggagaattgaaacatatcagtagatatggggtttccgtctcccatgtctattataccctcaaatttttctttctttaactttttagggattctgatattgatagtaatttcagctttttgaccttcacttgtttctgctttgatttttgcggtcgcgtccttctccaggtcatccttcgcagtcagggcaatttttaattccccctggagttgttcggtattaacttgtttgaacccattcccttctatatcccatttaagttctttgatggcgcctttcggtttgccgacaagcaagaaagtgattttttcaccgatcccgatgtttttccttttccgatcctcttccttatctcctgttccgcctttgatgtaataatctgcagaacaaagtgcttgctgtttaatttgcagggggccggtggcttcttcttccgtttcttccagagtgtcttcctcttcttcatcagcccacagaaaaacggaactgaatagaatcatcagaatgaggatcgacaaacgggaaagaaatgaagggggagttagcggcattttataaaagaacaattgaattttatataaaaacatattatccgtcaatatgggtttttgaaatatagggttatgaaaaattttgggacctacatacttgactaaccaggaacttagcttttatacctcattatcactgccacacctctatgtactcatccgagtatacaaatctagggtatttttctttcaatagggaaattgtttcagaaaatatttcataataggattccattttttctttcggaaaccaaaaatgaaaatcgggtgttgcacatgtatacttcatcccttctttataatgtgcaaatctattacgatcatcgtataatcttttcagtattgatattttatgagatgatacaacttccaaataatttattttaccaattatattaaacgatgtgataagttttttcactaacatattttgttcatgacctattgttttttctaattgatgcttaaaaacagagttggtgaaggcttcaatactaagcccccaaaaaattattgcacaaatagcattctttatcccctcagggcaaataactgtttcaaattctgaaatttcatcaccttcgctgataggaactcttgtgtgtatatgctcaatgtcatttagatatttattataggcatcggaggcaaggtcttggaagattctttctgcattaattctatatccttctgacataaggacatcatactgctatctccctatattttcaaaatattagcccaatctaactcttcacttaagatttataaggacaattttctactcgtccaatatgggtaagaaaattgtatatcaactaaatcaacaaaataatcctcaatacgctgaaaataaacgcgtacgaaccaatcaaaacacgacaaaatttccctatcaaccaagcgatgatatgggaaaaactaagctcaaatacacttccttatatgaattcttttccaaatttcctaatgaggaatccgctcggaagtattttgagcttaagaggtggaatggtaatgtccgctgtcctcattgtggttctgaccatatcactgaatgcaaggataacaaaccaatgccttatcgctgtaaggattgtagaaagttcttcagcgtaagattcggaacaattttagaggaatccaaattgcctcttcacaaatggttgatgtgcatgtatctgttgtcaacttccagaaaaggcatttcctccatccagatttcaaaagaacttggaatcactcagaagactgcctggttcctctgtcacagaataagggaagtttggatgaaggataaaaaggagaagttggacggtatagtggaagtagatgaaaccttcatcagaggaaaggaatccaacaaacatttttccaagaaattgaacaaaggaagaggttcagtaggtaaattgattgtaatcggagctaaacagaggaatggtaatgtgatcgtcaaacatatcgacgatacttccgcttacaatttacagggattcattggaaaacatgttgagaggaattccaatgtgttcacggatgagtttaggtcctataaaggattgaccggatttgtccatgagttcgtcaatcactcagggaagcaatatgtcaatggtaatgtccataccaattccattgaaagcttctggtctctactgaagagaggttattatggcgtttaccactatatgtctcctaagcatttaaagaggtatatccatgagttttcctataggcataatacctctaaggttgagacaatggattttataggcgatacgattaccaagatggttggtaagaaaattatgtattgtgatttggtgaagtcattttgaaaaaatgttactatttacaaattcaccagatcatattttcggtagtgatggataagagtcattccatacaatatccatcattagatcagagttatcagagaaccattcagcccagttcgttggattagcttgaactcttctattacaaaactcatattggaaaaaattttctcaatactatggatgaatgatggaacaacatatctatatcttcttcatgaatttcatcaaaatcccaccaatatgctaaagcagagtgagctgtcattttgcatcttagttctgatatatattgcatgattcccatagtgcgttttgatacttccaatacagaacagatatgggaaactaaatccttattttttgctgcacagaattttgattttttaatgaaatttcctattgcttcaaggatacaagacaaatgagttatagattctgcgtaaaataatttgtttttaagttgaactgccttcataaaatgaaaacaagcaatatggacttgaggttcaagacagtttattatttccaagtatttttttatggattttattttccgagaataagaacatttattgttatttgtcttggtattgaaggtaaacaattctttctcatatatttttctataagaaaaattattccctttgaaatcaaaaaaatttaccatattcaagagtaagtcctactgtaagattaacttgcctacttctatagatatattgatttaataaccaaaaaaagtctcttattatttcatatacaatatcatctgattttgctcgcttctttcccaaaatatgtcgccaacttggagctattacacttactaataattttttatttttgatctttgaaactgatataaaattatttgttatatttaaatttaatttttttgtttttccaatatgtctcgttatgcaaagtctttctgattcaagatcaaatagtgatttattgacaacgttttttaatacatctctcatctttttcaaattgttttcattcatgccttgcttagcataaataccgcaaaactcagaaaagaatatattattatgagattctttcatctatgaatgaacagtaaattgaatatttgaaatttacagtaaataattttatgattgtagatgataaatgggtttttgaatataaagaaagggtgagggtatcaaaaatgccattaccaaagtggagaatttttgttgtgttttttatttctaaaattcttaatgttaaaattaagcaatcaactccttatagatggaggtgcggaaacacaaaatattgatattatttgtttgggtttagaaattttactagttctttttcatctgacattttctgattatatattttacatatttctgagatttctccattttcaatttttattattctcacaagatcattagggactaattgagcacacttcaagatagattccgaaaaggcaaaaatatcttgatctttttcaataaaatgagttgatgtagtatttctttgaaaagaatcgccttcattagaatattcttttggattcatctcttttaacccttcgattgctgtttctacttcagatgctgtttcctcaataatttcatcatcaggagaaaagatattttctccaagacattctattaaagaatttcgtcgtatactatatgaaggattattaggatcagcttctaagcgaaaatttataatatatttgaacattattgcaatatatctcgtaataattatggaatcaagccggaaaatagagtttactcaaaaactgagtaaactcctttggtgatctcaatggggtcaatcccaagtatctgacagatcaggatgacctcggtaaacgtcaggtatctttcaccggattcatacttggaaacaaatgtccgagtattatccagcagtaaagagagtttgagctgagaatatcctttctcaatacgtttttgtcgcagaagtgttctaagtgcctcttcgggcacactactacgatttcttttcattaccgcagtatagcagaaattttaaatcccccaatttaggggatatttctgtttacagccgccttcgcttggtgcattatgctggtaagtctcccaattaaggagatacaaaaagcaagaactatgaagacattattacttggaacagtcctggcatccttggctctgctcacctcatgcagcaagtcgtcatccaatgaagatggaaacaattcagaagctccattgacactggcaggaaaaactcttacaggaggcatgtatgtagactaccaagaaggagacggattttgaattggaagccaaggattttgttttcagcgccggaaccgtcacgtttggtgctgtcgaatatgatgccaatgaccatgagacaactagaacgattacaggaagttatgtttttgaaaagaccggaactaatgtaggaattttgcagattgagtcaaattgggtagggtttaatcttaatttgacgtttaatggtagtaatgttgctgctgaaggtacaatgaaagagaatatgggaaaggaattacctgcaaagggtacgtttaataagaggtaatttatttattacaaatatattatgaaaaacgctgactaggtattctagtcagcgtttttgtctaagttattcaccttcagaggaaaagggaatgacgaaaatattataaaatagtttggttagtcaagtatgtaggtcccaaaattttataccaataaatggttagtctgttccgtatatggtgcgcaaaggagattgaaacaggcaggcgccggaagaggcgattcttcacatcacctttcaggcgtgttgacggcttttcctcatccctgctttggtggggaggaatatggcaaaacaagtattacagcggctcagtttcaccgccggggaactgaccccgtggctggccgggcgcgccgacctggaccctgtgtcccgcggcgcgtcccggctgaggaatttcctggtcagtcccttcggcggactccggcgcaggccgggaacgcgcctagtcgcccgcgctgggtgcacggagggggccgtgaggctggtttccttcaagtactctacgggcgtgcagttcatgctggaagtggggcgcggctacatccggtatttcaaggacggcgcgcccctgccggatgcggagggcggcgtgctggaaacgcctaccccgtggaagacggacgagcaggtggggaacctccggatgcagcagctgaatgatgtgatttactgcgtggagccgtccacgccgcccatgacgctggcccgccatgcggacgatgactggaggctggaggcgctggagttttccggcatgccctatgaaagctccctgttcaatgtcgtgaggctggaatgccgcatggtgcgggacggcagcgccaacaggctgatggccacggcggacgaggatgtgttcacgccggaaatggaggggagggaattcctgcgcgtcaccaggaagtacggagaggctgtcgtggagggaacgcagatgcccttttaccatctgacgaccctggaccgggacctctacaagggggagactttttccatggaccgggaagacggctggcggcaggcctatacctgcatccgtgatttcagccggaaaaacgattaccagcccggagtgaaccgcccggagcggtacacggccttttttgaaaaaggttccgatgccagcgcccgcgtccatgtcagcggcgcgtggacgctggaaacgacgggcacctgggatgcggagtgggaaatctgccgggggtatccggacggctccaactaccttcccaaccagccggagctggtgtggcattccgtgaagagcttccagcagcgggacgggttccggaacaactttaccctgagcggcaatgaagaggaaatgtcctactacaaaatccgcctgatggcgtacaggaacggcgtttccacgggaacgcccgtgttccgggccgccgccggctccttcaaccatgaaatggtagtggaggaatatgtttccccccgcagcgcctacctcgcgaacgcccttcatctgtcctattacgtgctgggcgactgcgagaccaatgactggtcattcggcgcgttcggcgtccggaacggctatccgtgcacggtggagttccaccaggggcggctgtggttcgggggtacgccggggcagccgcagacgctgtgggccagcagggtggatgatttttccgcgttcactcccggcattccgtcggattctcccatgattctgacgatggcggcctcccagcagaaccgcatctcctggattgcctccctccgggggctgatgatcggcaccagcgagggagagtggcgcttgtccgcctccaactcggaagggctgaatgcgtccaatgccgggtttgagcgccattccggggtggggtccgcctctctggacgccctgacggtggaaaacagccttctgttcgtgcagcagggagggatgaaggtccgggaattgttctattccctggaggcggacggctaccagacgcgggacgtcagcctgctgtccggccacctgctggcggcggggattgtggactggacggtgcagaggagcacggcgttccacgtctggtgcgtgctgggggacggcagcgccgtgtgcatgacgctgaacagggagcagaacgtggcggcgtggcacgcccaccgcctggagcatggacgcatcctgtccgtggcgtccctgcgcggctcccatggcacgccggatgaagaggtgtggtttgccgtggcgcgcggggaaggggagcgggcctgcatcacggtggaacgcctggcggacggcaacgtctgcctggatgcctgcacggaggccgtggtgcagggagagaagatggccggcctgggccatctggcggggtgcggcgccctcctgctggacggggagggagcctgcctgcccatcagcgtggatggggaggggaatgccgcctgtcccggcaggctggacggagaaaccgtgaccgtagggctggccgctccggcggaggtgaggacgatgcccctggagacgcttgagacgctgggcagatttaaaaagcagcttggcgcgcgggcgctccttcatgaaagcaccctgaaattccgttacggaacgggccatccggatgcgtggagggatttccagcccggcaggtacggcgtggcggagccttattccggctacgtgcggatgatccacaactacggcatggatgaacagtcctgcttcgccctccgtgtggagacgccggaccagttcaatctgctggccctggtgctggatgtggaattatagggcgcgggagcgcttacggctgttcggccgcctcctcatgggaaagcatgtgcacgatgaccttgaggccgtgcttttccccggccgccttcgccagggagcggatggcggaggccgtcattccgttgcggccgatgatgcgggccacgtccgtcttttccagaatcaggcggaagcggacggcgtctccctgcggagattccgcaacgcgcaattccgcctgttccggatgttgcacgaattgcagggcgatcaattgcaggtactggcggatttgttctacggcaggatgcatgaagggaaatgtgggttatttccattaccctactataaaaccgcctgattgaaaagatgcaattccagacattccctgaaaaagaaagtcgccccggtcgtaaaacgaccggggcgccccaactaccctatgaaactggatccgttaagatccagagagcttttttaacgagcgctcacctgctcgaaacgcaatataggacaggaaaaagggataagcaagtattttttcattgaaacgattgtttttattcaggaaaaacaacatcgtattctttacaatatcaggccggaaagaaggatattgttataataacaaaatcatctgccgggaagcagttcataagtgaagcccttaaggtattccgtttccggaatgttcagtaaaattggatgatccggtctttggccgtgttgctgtatcaggcgcagggtggcgggcgcatcgatggcggcgtcgagaacgctttcccggaacaggtccgccccggcgtggtgggaacagcagaaggtggaaagaatgcctcccggggccagaagcttcatggcgcggaggtggatttccttatacccgcgcatggcgtcatgcacggacttcttgtttctggtgaaggagggcgggtccagaatgatcaggtcccacttgtgctcccctccgtcccggacgagggccgcctccttcttcaggaagtcaaacgcgttgtccgtaacgcactggatggagacgccgttcagctttgcgttgcgcgccacggcgtccatggcgtcctgggatacgtccacggccgttacctccgcggctccggcaagggcgcaggccagcgcaaagccgccctggttgcagaagcagtccagcacgcggcgtccgcgggcaaagcgcgccacggcggcgtaattgtcaagctggtccaggtacagccctgttttctgccccgtctggaggtcaatcatgaattgcacgctgccgctgcttgcggcgaagggttccggttcctgcccgcgcgccacccggacggaaggctcaatgccctccgccgccagcatgggggaatcgttcctgacgatgattcccctgggggaaagcaggtcttccagaacgttcaggataatggggaggcggcgctccatggcgatggtcagcgtctggacgaccaggtaatccgcgtaacggtccacaatcaggccgggaaggccgtcagactcgctccagacgaggcgcgtgagcgtttcctccggcagccactggcggcgcagttccaccgcctggctgatgcgcctggaaaaaaagtccccgtccagttcctgcttgcggcgggaaaaacgtctggcgacgatctgggaatgggggttgaacatggcggaccccaggaagcggtccttgaaatccttcagcgccacgacgtcccccggctggggattgccgaagaccttgcgcacttccgtgccgtaaacccagtcgtgcccctgaaaaatgcgtgctcttggagaaataatcaaacctgccatgtcaggaaaggcaatacatgatcagggtggaaagttcaagggtaatgcggaggggaggcgcaagggccgcggctgccggagggaaggggatgtctgttaaaggagaaaagcttttttctcttcccgtgctgtttatgcccttgtgggaagtaagaaataagctccctgccgtgctccggatgatggttcgggagggaaggccgggagaacccgcctggtggctggacggaaagcgaagcatgcaacgcgcggaacggatgaatttaaaagatgaacggctcaaccctacgcttccagttggccgttttccatttaagccgtgaacctccgctgtctctcttgatggccgcgccccgggaacaagggcctcccggccctcgtaaatcaaaacaaaccgggttttccttccttggcagtcaggagcgccgcaaacctttgcggcaactgaaggggaactggatggtagcgaagtaatattaaaaatggccttttctgattaaagggcgcgtctttcagccgaatatccatccggctgtggcagaggcctgcggtcattttccgcagcgggaagggtgaaggcttccgttccctggaattttccgcacaagtgaaccaatgcgcatcattccgggactatttcggttgaaaatgcccggaaacgaagtaaaatgtggcgcgttatgaaagtagaaacttttgaaactccccaggatgctgccaaagctttggcaggagaagttgcggaactgatccgcacgcgcgccgccgaaggcaggaacgtggttcttggcctcgccacgggcgccactccgctgcccttttatgcggagctggtccgcctgcacaaggaagaaggcctttcctttgctaacgtcatctccttcaatctggacgaatacagcggcctggaccacgaccatccggaatcctactggtacttcatgcacaccaatctcttcaaccacatcgacatgaagccggagaacatcaacctgccctccggcacggtgaagggtgacgagattgccgcccactgcgccgcctacgaacagaaaatcaaggactgcggcggcatcgacctccagattctcggcattggccgcaccggccacatcggcttcaacgaacccggctccgacgataccaccatcacccgccaggtgcatctggacgaactgacccgttccgacgccgcccccgctttcggcggcattgaaaacgttcccaccaccgccatcaccatgggcgtggccaccatcatgggcgcccgggaagtggctctgatggcctggggcgaaaagaaggcttccatcgtgaagaaggccgttcaggggcctgtgacggtggacgtggccgcctcctacctgcagaagcacccgaacgccaggttccttctggacaagggcgccgcttcccagctttaattatccgttcaacaacgaacacgccgcttttcccggttccgtggaaaggcggcgtttttgatggaatgaaggaaggcggaatcttctttttccagcggggatggcgtggggggagctccgtatgtccggacagttggtcccgtgaaggaagattttgtgtcattgaggggagtgtggaacagctgtggctgctccggtggacgcaggccggcaggtaataaagaaggtccgtttttccctaacatggctggtccggcgggatgaaatgggagtgatatttttattgtttattaaaaatgaatgagttttaatgctgtgtgggacgtattttcctgtttccggatgcgcttccggagcccggaggcaaacccggagttcctgtcagggatttcctttaaaagggggatggcggattggccgtttaaccggctgcacctttttattaggatggagtggcgcattgacaagagtttcattttccgtgcatggttgaaggtgccaatagatgaaaaataaatatatccggcagtgtgtaattaatatttcattcaggaattacagatgatggccggtttttatagatagaacaggaaaaacagaaatatgaaacaaatgaagatactgatggtcgtaaccggaaccgggatgtttcccgacggaaaacaggaaacgggattgtggctcagcgagctcacccacatttacgacagcgcgaaaaagcggggatatgacatcgtcatcgcaagtccgaagggtggcgatacccccgtcgatcccatgagtctgaaaacgatgtacatggacaaactgtccaaaagctgctgggacgattcgggattccgggatgtgctgcggcacacgaaaagcctggatgaagtttccggtgagatgttcgactgcatttatttggccggcggccacggcgcgatgttcgattttccggataatgccgttctgcaaacgttcattaaagaccactatgaaaacaataaagtggttggagccatttgccacggcgtatgcggactattaaacgtgaagctctcggacggagaatacctggtaaaagataaaaaggtcacgggattcagctggtttgaggaaggcctggcaggaaagaaagagttggtgccttttgacctggaatccgcgctgaaggaacgccgggcagattacaagaagtcattgattccgatgatgccggaggtagtgacggacggaaacctgatcacgggccaggacccgttcagttctgaaaaaatggctgaaacggtcatgagccggtttaaccaatagcagttggccgggaccgcctgctgcggcgttccgggggcgcgttatgcctcacaggaacagggcctgggctacttgagccaggccaggaattcatggttgccgtccgttccggtgatgggggagggttcgcatcccatccaggagcggttcagctcctccgtgacgaaggcgcgtatggagtccaccgcccgctggtgcagggccgggtcccggacgatgccgccgggaccgatgtcttccggctggagctcaaactggggcttgatgagcaccagggcgtccccgccttccttcagcaggggaaaggccgcgggcaggatttttttcagggagatgaaggaaacgtcggagacgatcaggtccacctgctccccgatgtcttccggagtcatgtaacgggcgttgaatttctccttcacgatgacgcgggggtcccgccgcagtttccagacgagctggttggtgccgacgtcgaccgcgtggaccctggcggccccgtgctggagcaggcagtccgtaaagcctccggtggacgcgcctatgtccaggcagaccttgccgtccgcggaaacgggaaaggcgttcagggcgccctccatcttcaggccgccgcggctgacgtagcgggggcggttcctgacggcaatctccgcgtcttcattgaccttgaggcccggcttggtggaggggtggccgcccacgctcacctctccggcaatgatgagcctctgggccagttcccgggattctacgagattgcgggaaaccagaaggacgtcgagtcgttgcttgctcataattcggaaggaaggtgcgcacgcaggtatttcatgaaaccgcatggggaatcaagaaaaaccgcgcgcagggggcatttggctgcaaatttgcgccatggcgcgcgctggagcattttaccattgattcagcgcggatttatacgagactttccggcgaatggaacaccgctacaggcaattaatgcgcaaggtcaggctctacctgctgacggaagtgcgtaaaaaatcatggaccagcaagttcctttccgccaggatttttgaccatgtttactggtcctggaacaggcagtccgtggctacgggcgccgcctggggggccgcggcggcgattgccccgctgcccatgcagagcctgtggggcgtgtttgcctgcctgtggcgcaaggggaatattcccgtagccatcctgatggcgtggctctccccccccggcttcaccttttttgccattcccgcccagtggtggctggggtggttccttttttcccttctggggtttcccacttctggcgcgaactggcaaatgctgaaaacggcagtgcagcagtggtcctgggctccctttgacgggctgggcatcggcatggtcagtttgggattcgtgacgggctggattatttccagcgtcgtattgggatgcctgtgctatggactggtgcaggctgcctggaggataggccattttctgcgcagcaggaaaaaaacaggaaagtcctcttttagagaaggttctagtaaataaaactccttcgtccggattcctgaaactatgaattatatttttattgttgacttttatggtataaattttatagttctaaacatctcctgcgtatgacgatgtcttcctctattgattccttgttcaggaaatattttcactgcctgatttttctttggtttggcggagtcatgttgctgggagggtggtgttcccaggctgatgaacctccgtcgggtggggatacaggagcactctccatcgaatcgaaaactaccctttattccgctgattattatataacaggagaagagaatgaggatgataaaaagagaagtttcataggcataggggaaagttttacccttacgttaacgggaaaacccaagggtgatcttaaagagctgacatggaagtttatttcaggaaaggaactggttgaagaaattggagaaaaaaatcttaaaggaaagacgaaaattacattgacggccagaaaagatctgactcttgatcaacttaaaggccactctggcatcaacctgaaggtcactacgaatgaaggtcatatcgtggctatgcaaaaccccatagtcgtgatttttcccaagggaatgaccgctaaacatatgggagctgggacaccagaggaaaattgcaataacccaggtgcaacggagccttcagcccaattgatagttacgttgcaacctacgaacgtcgcctttagaaatattagaatcattgaacgagatttaggttctgagcccaataatcctcggaaaagtatggatattgggcatacaggtcacggagtagatagggtaatagagattaatcaattcaaccgatttaaagatcgtctcaagggaacagttgtccatcaggatattctagatggaacacatattttaccgcaggattggaaatggaaatgttcttggcgtgttcataaaggacgtggaggtccaataggaatatcaggaggagacgatgttggacaaataggaggagttgttgaacaaagttttaaattttattatcagatcaatccacaaacaggaaaaataggtgcaatttgtggggaagtatcaaaattcggatgtactgctaagggtatttcgaatggctccgggaatcattatagttatttggggcccaaagaaacagatcaatagaattagtttatgaaaatgcaatcttatcttttttccctgtgcatgtttatgggaatcgtgatttcttcaaacgcgtcagatttttcagttcccttggagaaacccagtagtatcaaatctttaagtgatattccggaaggtatcaaggccttgggcatcttgctcaaggaaaacaagctcgaagaattttacaaaaaatctaggaaattgcatctcaagagttatcctgatgcagaagatatagcatctgtgcgggagtttttctggcttgcctattatgtttccttcgctcctctttttccttttgaggattacgattgcaggacaacggcgtcctttaacgacaatatagatttacggcttttgggagacgtttttgaccgttttctcaaaatagcccggaatgatctggatgaatttacaacccagcagcccctgaaacggaaggaattggcgcatcttttcagcctttatgccgcccgcatgctgtacagcgtgcggagtgcctatgctggcgatttgccggaacgggaaaaggttgcccggcagaattatcaaaaagcggttgccgaacgcatggaaaaagcaactacgctggaggaaaaacttgatccgtttggagcggagaccggaaggatggcgaggaatttggataacaaaatagtggccaacgacggaaggaatatggagattaaaaataccgtcgagaggatggaagaagatttcgtgcctactctggttcgcctgttccccggaaaaaagggagaggtggtcaaatacatccgcctggcaggctatcagggaggggaaatcaacgatcttgtggaccgtactgtagggcggagctcaaccacggaatttctgtacaagggacgtagcagcaaggatgcccgataagcttttctaaatttatttttttgcgagtactaactcgttcgtgttctgctgttggaagccgagaacacggagtctcccagtctctctcccgggagagacgaaacttggagcatttttccggtcgtcagacggccacttccatcagcagaacggtggagttctggaccgcttcaatggtgatggagcccgtatccgttattccggctccgtcccggcggtgcagcaccgtgtctccgatcttgatttctccgtctatcacgaagacgtacaccccggtgttctggcacttgaattgatattcccgttccacgccccggtcgagttccgcccaggagaaccaggcctgctgcatgatggagatatccgtttccggagccaggaaggtggaaatctcattgtgcttcagcaggggcttgatgtcgtagtcccggtatttggggggcgtgttgaccctgtccggaatgacccatatttgaaggaattccagggggtccgtggaactgccgttgaattcgctgtgctggatgcccgttccggcgctcatcacctggatttctccgcgggtgatggtatggctgttgttcaggctgtctccgtggcggagctgtcctttcaggggaatggaaattacctccatgttcttgtgggggtgggtgccgaagccttcttccgggagaaccgtgtcgtcgttgagtacgcgcagggctccgaactgcatgcggtccggattgaagtaattggcaaaactgaacgtatggtatgtattcagccatccgtggttggcatgcccacgggaagatgcacggtcaatgatgatgttcatgattgatagggttggtattgaaagcggattcccgcctgtagatggtttgaccggatggaccccggggttgttcaaggcgcatgacagcatgtccgttgccgtaaaataaatcggcaacacaaattgatggtgcaatgtctcttattttaaggtagcgtgtcgcggtacctgtgcaaacaagacaaggcgtatggctcatcggacattcatgagatggatcaagggattggttcctacggtgattattttgctgggcgccttggtgcttgggtgcatctgttatgtctccatctggggcgctccctcctttgtcgtgcagcgtgtggaacaggctctgatggaaaaaggcattcccgtccacatagagacgctgaagatttccctgtggccccgcgccgtggtgaccttgaagaacgtggagctgctggatcctggtgttcctccggaggcgcgccgccccgtggccctgctgcatgaggcggacgtggccctgaactggaaggagctgatagacgggcaggtagtgccggaacggctgaacgtgaaagggctggacgtcaatcttcccgtggacgcggaaaagcctgaaagagttttttccaccgcagggctgaatgcggagctggacctggggcgtcccggcatggtggacatcgtgaaggctgatgccgtggtgcagggtatccgcgtgaccgcccagggggcgttttccatcgggcagggggattccggagattttacgctgacggctgaagacatggccgccgtcagggagcagttgaaccaggtgctgaaatacctggaccgggtgaagtggccggaggcgtctccgcccagcctggccgtcaatttgagcgacgacccgaaagggggagtgcgcgtgggcatggatttgcaggctccttccctgaggtacgggaaaatccgggtcagggatttcctgttcagcggggattacgcggattccgtcatcatggccaagcgctttaccatgagggatgcggaaacggccggcttcgtcaatctttccctccaggccgatttgaagaaacgttccctgatctgggatgtccgcagcacggcccccctggtgtcctgggccgtagccattgttgatgaagccctggtgccgcgggagatgaagttcctgagcgagccgcacgtacaggtgtcaggccgtgcggttttcacggagaactgggagggcgtggagcatctgaacgtcatgggatccggctccatgggagctttctccgtgctgggggaaaagttccagagggcctcctgcgatttcagctatgaggacggcaatttttatgcgacggatttggacatacggcaccccggcggcgttttttccggcaaggtgatgggcgtggacggagagatcaagatagacgtgcacagcacgctgcccatgcatgcgatgctggacatggcccggtccattgctccggaagacgtgaagctgccgcctacgctggaaatcaaaggagaccctgaattgaaagtgtacggcaccgtgggaatggggaagggctggaaagggccgttccgggtggaccgcctccagattgaggcggccgtgacggacgtctcctaccagggggtggagttcgcctccgccgccgccaggggggaattgatcggccgctccatcaatgtcacccagttggacctggcgcgggaggacggccatgtgaagctggaaggcagctatctgggaaccgatcttgtcttcacgctggaatctgatttgaagcctgaattgctggtagccctggccgggaatttggcgcccattcccgagaatttgaagctgccggaaaaagcctccctgtgggtgcacggcaggctggatattccggaaggcaagcctgtggagcccacgctggtccgggcgcgcatcaatgcggaaaacctggcctggaacaaggtgcccgtgaagacggcgaatgtggaggtggagtaccgccccaaccagctttttgtacagaattgccggatcgggatggagaagggcgtttttgagctgttcgccaacggtttcctggacggccagatgttcgtgatggggcagtccacggttccgctggaaacgatagaccggctgctgggcatgaaggatgacgacttttttatgagccgcttcgtcttccgcaaggattccggcctggagctttccttccaggggacgctgggcctgtacaatctggaaaaggcttacgatttgcaggccactgtttccgcgacgaatacgcggtacaagggcgtggacctgaagtccgcgcgggcggatgcccatctggtgacggaccaattggtgctgaccaacgtgacgacggtggtttccaacgggaattacctgtcttccgccgggttgtccggcggtcccgcggagtgcacgctcaaggccaagagcatagatttccgctttgtccaggatacggtggaggttctgggcatggagggccaagcctaccccggttataccatgcgcatgttttccgacaacgccgccaaggttttgaaggagtttgtctttacccggcccgtgacgctttccggcggaggcatgttcccgatgggggacgacatgaagctgatgaaggggcgcatccgctttgacgcctccgcggggcgcgtgcgctatcccttgctgggaaccacgctggaccttggaaaggcgaaaggggaaattcttatttccccgcagtgggtggtggtggacaagatgaagggcaccatctgggacggctcctttacggggcgcgtgctggcgcagattgacgatggggacgccctgaatggctcctttgtcctccaggacatgaacctgacctccatcgggagatcctacggcaagaagatggagaaggccaccgtgcacggggccattgaattttcatccaagggaggcaatatgaactccatccaggcgaagggcgaggccgccctggtgcatggggacttggtggaaatccccctcttcggctttttgggggaagccctctccaattatattccgggcctgggccacctgatcaattacaagatcaccagggccgactgcgatttttccattgagaagggctatatccgcaccagcaatttctcggccaagggcagcaatatgtccctggaaggcggcggctggatacgccttgccgacttgcaggttaattctgatttcaagctggggcttcgcggcctgccggggctgattacctctcccgtcttcctgctggcggggggattgttccaggtgcgcggcacggggcctttgagcaatgtttcctggagctttgcgccgttctccggcggaaaagcccctgttccccccgcggcggctcccgcccggaggaggtagagaaggggaatgccgggtttcccggagaaaagcgtcatggagcgccgcatgcccacgcggcaactgaacggaaacgcggctgcaagccgcgcccttttgtagtcccgtattggattgatgtttcccgtctttaatgaaccggtccgccaacgctcattgataatccggttggcacacagcatgcaatgttccgtgacgcagcagggccgttccggacaatgccggaacggccctgcgggtccggagagcagagcgtccccgctccactctccactctcaaacttcaactctccttaaaagtcataccggtagcccacgctcccgttcaccgagttggctccgtcacggaagtccgcattgccgtccacgaagatcgttccctgcgttcctaccggcacgctcagccctgctccgatttgcagcgccgtcattcccaccttcgctcctctgactctctgcgtgaagccggggttgcccagcagcgccacattggtttctccgcggcggtcgcccatgtcctgggccgcgttcacccggaactcagccaatgcttctcgcccgaagatgttgctgccaatgagccccatccagcggccgcccagcgcaaccgttcccgttgtccattcctgcttgcctacgttcaggcccgcgttccccgctcccgtttccgtgtagccgtccatgcgcgtcgtcaccaccgaggcgttggccaggggctgcaggatgctgctcctgtcttcgttgaggtacacgtcgtaggtcagttcatacatcgctccaaagccccacccgctggtgttgccctgcgtcctgtagctgccttcaccgtagttgaccgtgcggttgagcttcgcgtcgttccacccgcccgtcaggatcaatgtgtgcgcccagcgcttgctctggtagcggccgaagaggttggcgtagtagctgtccaggtggccgtccgcgctgtccgccgcgctggccgtaaggtcgccgtagttggccgtgaaggccgctcccatggtgaagtggtcgctgaggtccacgtccatgcccacggtgccgccccaggtggtgagctggtagccgctttcatcccccctggtgtccagcttggcgtaggagcccgtgccttccatccacatgtggaagtaggggaggtcttcgttgacgtaggcggggttgacgcccatgagggtggtgcggttcctgatccatcccatctggtcgcgcagggcgtccttctgggccgttcccagcgcgttgaccgtgcttcccgctgctgcggccagcttgcgggtggcggaagccagggctccgttttccatatctctggcgatggagtcggagatcaggtaaagatgggatgtctggtccttcgcaatgatccatttggcttcattcagcatggtgccgccagcggtggagttgtgggtggcggaagcgtccagataagggttttccgtgcgctcttcgcccagaaggacgatgtcgctgccctgcgcttccaggcgcaggttgtagagcagggaaaggaagccggcggtcagcttgcagccgctccccagcgtggcggtcgtaccgtccgccccttccagcagaacaaggtccagcgtacggtcttccgcattgaaggaggaggatgcgttgtagaggttgatggaggcgtcccccacgctgacagttcctgtggaggaaacggccgttcccatgccccgggatgaagtggagtccatgtaaatgttcagcgtggagccgccgcccatggagaaatccccgttgacgttaagatggggcgttcctgtgccggaaaccagggtcagcgtgccgccgttttctgcgcttacctgcccgtaggccagttcactgcccttgaggaccagggagcccctggtgatggacagattgacgtcggcggatccggcgccttccagcgtttgggtgcctgttccgttcatctcaatggtgcccgctccctggaagctgccggagaagacgccggaggcattgtgcaggccaagcgtgccgccgttcagattgacggtgccgtccccggccagtccccccacgctgagcgtgccgtcaacggtggtggaggccccgtcccggagagccagcgtcgtgtcgtcgctgatggagccgccttccgccagggagaaggcatttccggttccgctgaccgtgaacgtgccggttcccgtgacggctgcggcaagtgccgtggaggaaagaacggtcagttccgaatctttgccgaggctgatggacgaatccgcgcccgtcgccaggctgtttaccgttgcggaggctttttcaccgagcagcagcgcgccgttgacttcaagggcgtccacgctgctccccgttcccgtcagccccagaatggcgtcctgctccaccgtggcgttggccgtggtgagttttccgccaatgttcagcgtgccttccgccacatccaggtggcttgtccgtacgtttccgccgatgttcatggtgtatccggcgccttccttgcggatggcggcgtctccttcaatggagcctttataggtggaattggcgatgtttccgctgttggccaggacgacggtaaggccggcattggtccccgtgttgatcgtggccgtagagagggccccttccagattattcaggcggaggtcctgcgttccggtcatgtcaatgttgatgaccccgttgttgtggatgccctccagggcttccacgatgttcctgtccccgtcctgaagggtgaggggggcgtctccctcgttctgcaccagccagccggacgcaggggctccttccttgggagagagcaccagggaacctcccctggacgtgacgccggagccgaagatggagttaaagatgtggtagggcgtgtcaaagtccaccgtggttccctcttccaggttcagcgtgccgttggtgatgtggataaggcagtcgtccaggttcgccagaagggcggctacggcgtcatccgtcagttggagcagcaggtccccggacagggtaacgctgccgtccgcggcggtggagaaggagaatatctctccattgccgcctcccaccatgtcggaggatatgcccagcgtactgccggacagggaaatgtttccgcccccgatgtccgtgacatgggtggcccggtcacccgtgcggctggccgcgccctggaaggatttgaggcgggtcccggacatgccgcccatggagacggcggcgggttcccggccgggagcgtcctgccggatgaagacgtttcccgtggcgttctgcgctcccgccagggagccgtagcccaggaagatgttcccggccagcgccgctccgttcatgttcagcaggccgccgttgacggtggtgtccccggtgtaattgcttcctgcgccgatggcgagcgtaccgtccccttccttgaccagggagcctgctccgcccatgttgccattgaaggtgatgtccgtttcgttggtgtcaatggtgttggtggttcccgccttcagggtaacggtgttggaggcgacgttctgcgcccattgctccgtggcccggatggtgacgttattgagctccaggaccgtgttggcgttgaggttcaagcctccggctcccagctccgcaacggtgtccttgttgccgtctcccgttccgccgcccagaatgagcgtgccggcctggacgcttttgatcccgcgggccgctatgctggcgccggagagctgaagcttctgggcaatattgccgttggtgcggaaggtcagttcgttgtttccgccgatgaggttcccggtgatggaggaagttccgttgctgtaaacgatgatgttggcatccgcggacagagtgacgtttccggagatggtggaaccgtccatccggagagcccccagtttatcattggtggtggctgttcccgtgccggcaatcgtaaagtcctgggcccaggttcctttgttcatgaacaggtgcgtgccggcttccaccgtgattgttttgacagctgccaggttgctgcccgtatctcccgcgaaccgcaggtttccgcgcagaaccaggtttcctccgaagcctgcgaaaatggccttgttaatgttggtttcatcctgccccgtgttgttcaggatgatggtccccgtgccagtgacgttgttggtgaacagggaggcgtccttgcccgcattcgtggtaatggcgtacagcagggttccgttttcctccacttctatgccgccggttcccagtcccgttctggttccatagttaaaggacagcgtgccctccatgacttgcgtgcctcccgtataggtattggccgcgtttccaataacgagcgttccgcctccggacttgacgagttttccggcggaaccgtccgccgtgtctgacaggattccgttcagggtggcggcgccttctccggaaacggtaaacgttccgctgcccgtcatggaaatgtcattggcgaggatggaggaatcacccagaatgagccccgttccggcggccatggtgatttttcccgtgccgagggcttccgagttgttgacggcaatgcttcctttgagcagttccgtccctcccgtgtaggcattcgccgtgttgatcgtcagcgtgccgtccgcgttcatggtcagcgtgccgcttcccgtaatggagccgctgccgccgaagacgtagccgtccgcggtgaccgtcagggagccggggctgacgttgccggaaatggcaacgctgcgtttgtccgccgctgtggttccgtcaaacgtgacgtggtcgcccgtgtagaatttgttgtcgtcgctgccggtgatgctccagggggaatccgctccggcggtcccttccgtcctccagacgccttctccccctccgttccagaccaggctgccgttttctcccttctccgtcacatccaggacgagggattttccgtcttccgacagtgaaatattggcgaccgccccgcggttcaggccgatgaaatggagttccccgttgttgatgaagctgccggtggcggtggtgaacagcgtgtattggtcttccgtggaagtggagaggtcaatgttgaaggaaagaccgttaagttccacggcggcggttcccgtgtaggtgagctggtcgtgctcggcccccatgatgtccatgaaaatgttcacgtccgtgccgaaggccagggaagagacgctgacgttggcaatcgtgccggagcctccgaggttcagggaacctcccgcaatagttacattgcccgcggagtaaccgccggcggcgttgcccagttgcagcattccttccgaggaagtgagccggccattgttcgttcctgcgaagatgaaggcgccggctccggatttaaccaggctgaccgtatcggcaatcgttccggtaaaggtgttcagttcatctttctggaccaggttcagggtatcgggattttccgccgtcgctccggagctttttccttcaagggtgccccggccgttcagcccggcaatgttggcggttttgtccgcattgttgacccacaggtagctgccttcaaggaagaggttgacggtggcgttgaccagggcgttctgatgggccagcaccagggccctttttttggtgggtgcgtctccggccccgtcgggagaaccgatgttcactgttccggtgaagtctgtgttttcactggtgatgaatagctgcctgttggccagatcatctattccgtcgcttccggcaaggaattggagggtgccttcgccgctcagcgttccggttagtccgattgtctttgcatactgggttttaatgtctgcgacgtcgctggcggattccccgatccggatattgccggacagcgtgtactggtaggaatccccgttcgggtcggaggcgttccctatgtagatttcagcgccgttgtgcaacctgatgttgttggcaacggagtgatggttgccgttgttgccgttcagcttcagcgtggcgtcccccaccacgatgccggctcccgtgaatttcagcttgctgccgttggcggctcccagctgcagggttcccgaggtgaccttcacgatgccctggtaattggcaagggccgtactggagttgacaatgagggcgtttgagcctgttttttcaaattggcctccgcttcctccaagctggccgttgaaagtacttgtgcctttggaagtgtcgaaggccagggttccctgttcgaccgtgaaatttttcccgtaggtaattcctccggaggtgggcttgatcgtcaaggttccctccccgcttttgacgtaggcgaagttattgcgggtgaccgcagcccacaccacgtcgttgccgttggtatccacccggatgatatccttcccggccgcggcattgctcatgttattggtaatgtccgtggtaatgccttccccgtatctgatggttcctccgccccaactgatttttcccgttcccagcacgccgtctgcgcccagttccagaaagcctccgttgaggttaatggtgccggagaagccgggattgagcgtttcaagcctcagcgtggaagttccggatttggtgagtgggccgttcccggccagggcgccgtcccctttcagcgtgtaattggtggtgtcggaattgaaggtgagtcccgccggggttaccgtgccggagatgaggacttccataaggtcctggacgtccacggtaccgaaaatgacggtatccgcatccgtgtaaaccgcattgtccgcccatggggaatcgtccggagttccgtccagggtccagacgttattgccggctgttccggcccatgtcaattcggcgcccatggcggaaggggtgagagaaaaactggcgaggagagccgccaagagtgtcataggtaaatgcagtttcatgacaagggatattgggatatttatatgttatttattataagtacataagactatttctggtcttttgttccaattaagctatagaattggactgttagtgtcaatctgttttttcaatggatggggagtatcggattcgcaatccggagacaggcttcatgtttgattaaaaaagagttacactggacaaactttttagcggagcatgaaatcgtcccttctgtccgctggtgcaggcacaaaggatggaaattttgctttcagccgaaggccaggcagggaaagcgggaaagactcgtgcacaaagcgttgtttctttagaagtccctgattgcttgaaataaaaaaatctattttttggaaattcttatatcggcaaaaatatgaacggattgcgaatccgctgtaaattaatattttcttaaaacatttattataaatacagttaaaatgaatttaacagtagggaaatctgataataatggcagaaatgaagaccgttgttccctggcgttcccttttggaagggcaggggctttcttttcctgtccgctttcggcagcccgtcaaaatgacgatttccgttcaggaaattttctggatgcggtacggaagcatttttccggacaagaccagaaaatgttaaaaattgggatgaaaatcatttatttttgattccgctgtcctggattcaagagaaattgaagaccgggaatcagatggaacctgagagatgcggcggcggggttgatattttccatggctggcttgaggagaggcaagacgttgaaggaaaatatttaaacggttcatcggaaagtttccctgcttgcgtagggagggctggcgttgtcccattctccggaaaaggaggaggcgtcccagcgtcattcatcatggcttcctgtagaaaatggatttcctgagggagattccgtcttccttctgccggaaaccatgatacagacggaaacggcaatgatgagcaatttcagaaaaaaagaccagtgcagcaggaagttcagccaccaggggtggtactgcgcctggacagtggccagcgcgtgaaagcgcatggaccacggagccaggagagggatgtctcccacgatgcagtccagaaagagatgcaggaagccgctcatggaaaagatcagcagccatgttccgcccgtgctccatggtttgatccggctgcctccccatgcgaggagcatcagcgcgaaccagacggaaggatagtgcgtccagtaggaatgatggtggtgctggcggccgtccagggtataaaaataaaacaggtccaggtccggggcaatcgcccccagcagggcggcggtcatgacggccttccttcccggtgtgcgtaaacggatggtttttgccaggagatagcctgcaggcagatgggcgatgaacatgagcgttcaatagaagaaaaacggacaaagacggacagtccgggtgcgtactacctggaaaaaggtttttccacccagtcaaaggatagttccctgtttccgcctcccacggaagaatagactgttctaacgccgccggatgaaggattcttccagatgagggacagttcctcaatccggctttcccccgattccaggaagatcttgtgaatgcggaggcaaggcaggcgccaggccctcacgtccgggtggacataggtggtttcccaggcggtttgatgtcctttgccggttccgcacgtccatgtaatgctcaaggacatttttttatcaggggtgctttttccggccccggtatattccacactgacgggaatggtcccggaagattgcgggatggctgccgggctgcaaacaagggcggcgagggataggggaaggaggctgatcattttttcacaagggaggggggcgttgagaaaaaagggggcggctggcctgcatcagccgccgcccccttggggaggggggttatctgccggatttgcccagcttgtacccggcgtaggtttccgtattgtacaggggctggttgtccggcacggcgtagccgatggatttgcggatggcgaggaagtccgccacgccttccggtcccacctggttcaggggggccttgtgcagcccggccatcagcaccatgcggcagtaggcgtccgcgttttccatgaaccattccgcttcttccacgtcgcgggctccggtgatcacgccgtggttttccatgaagaccacggtggattgtttggccgcttccgctacggcttgcgccgtctccagagagccgggcgtgccgtagggggccagcgggatgtggcccaggaagatgtccgcttccggattgatgccggaggggggaacctgcccggcgaacaggaaggcgttgcagtgcgggggatgggcgtggatgcaggagttgacgcccacggatttcatcatggcgatgtgcgttttcacctcactggtggaggggcgtatgcccgccttctggcgcgcgtccatgtccaccatgcagatgtcttccacagtcatgaagcccttggagcacagggtgggggagcagagcagcaggttctgcgccacgcgcacggagatgttgcccccattgccgtccacatattcgcggttccacaggcggcggcctatgtcgcatatgcgttccttgatcaccaggatttcaggggaatggaagaattcgttcacttcctcccgcgtgacggggttgtatttttcccacgggaacactttgtccgggaggggaggggagattgaccagtcttctgacatatttagttgcgtgttagtggttgagcttttcgtaggcggcttcctggggacccggcatatacgtccggtaagtgatgccgaaggcgtccctggcctgctccggcgtagagtacaccccggcgcccgcaaaggcaaacatggatgcgcccagcacggtactttcagatacttcagagaccttcacggggatccggaggatgtccgcccgcatctgggtccagacgctgtttctggcgcctccgcccaccaggatgaggaattcgcttttgaacccgcccacggattccaggcggcgcaggcgggatttcagccgccaggcaagcgcctccatggcggcgcggtaaatgtggccgcgcgtccggcccagcaccaggccgccgatggagcctttccggtccccggaagccaggaagtccggagccatcgttacgccgtcgcagccgggggggatggcggccgcttccgcatccatggtatcgtaggattcaccgcggaagcaggtggctttcacccattcaatgatgccggaaccgagccattgcaggccggggttcaagaggcccggttccgcgtcgaattctgccgtggctccatccgcgtagtcctccggtgtcagccgggcctgcgcggagcgcgccatcaggatttcccaggtgccggaggaaaggaccggctggtccctgtccgctccggaaccgaagatggcgaactgggtgtcgtgccccgcggaaatgacggggatgcccgccagggcggggatgcccatggccgccgccgcttccggcgtgaggacgccgatggtttcccccgcgtccaccgtgggggggaagaggccgcggcgcaggcctaggcggttcaggataagctcggaaaagtctcccgtttccaggtccgtgagctgggaggtcccggccatggtccggtccgtcgccatgacgccggtgagcttgtacgccaggaggttggagatgaagagccacgcatgggccttttccagcagctccgggcggttttccttaatccagacgagcttgtaaatggtgttgaaggcaaaggcgcccacgccggagatgcggtcaagctcttcctgggagatgtacttgccgatgtttttcatgacctccgccgtgcgggggcacttccaggatatgacggggtaaagctggctgccggaggcatccaccagcgcgccgtccacgccgaaggtggtgacggttaccgcccgcacctgttccgcatccaggccctcaagggccttcacggcgcattcggagagctgcttgaaaatccggtccgcgtcccagacgtggaattccgggttttcctcaccgggcagcgtggcgttcggctgcgaggccttgcccgcgatgacgccttgttcatccacaaccatcgcgcgcacgttcgtcgcgccgcagtccaagcagagggaatacatagagaaatactaaatattgaagattagatactaaagggaaactgttcagagattttgcccggcaagcgtttttgtcgtagcggtcaatagtcgcattaattccaggcaatcctgtttcaaactttcaaattgctggtccgtcaggcaggaagttgcatgcagaaggcggagccaataccaagtctccgaacattcttttagtgaaatgtgtactttggagaagaagtcttttttgcttacggcataggaagcttctgcgaggttggctcctatgcttgttccggagcgcagaatttgctggatcagtgcctgctcgcaccgttgcttgcgaagatggcggcataaggaaacgatacgaatggaaaaggcaaaacttttttcatgagcggcactttcgttcatcttttagtctttaatcattcgtatttagtctttgatattaacgctgaacgtcatcaggggaagaatgtcttcccctgatgaaaaggtcagtcgttaatatttgccgtacagcgggccgtagttggcgcaggcgcggaagtcggcgccttccgggtctgcagtgccatggaggccccaggcggagggacggtagatttggtcgtccgggatgttgtgggcgtatacggggatgcgcagcatggaggccagcgtcaggatgtccgcgccgatgtggccgtaggtgaaggctccatggttggcgcccatgttggccatgacgctgtagacgtccgtgaaggctcccttgccggtcaggcgcggggcgaaccaggtggtcggccagcccggatcggtgcgttcgtccagggtcttgtgcaccttggcgggcaggtccacggaccagccttccgccacgatgaggacggggccgaggcccttgacgatgttcaggcgcatcatggtgacgggcgcgccgcccttggtgacgtaatggacggagtagccgccgccgcggaagtattcccggttggccgggcaccagacggcttgttccatcatggttttcgcgtcgtccggggtaacgtcccagtgctttttcatgacgggcttgccgtccttgtccgtgcaggccatgcagccgtccagggccgcggagccggagttgatgaggtggatgatgccgtccttggcatggccttccagcttgtagcccgtgacgcgcttcacggcttccgggctccagtaggtgcgcacgtccgcaaagacgttggcctgtccggtgagcaggtagccgaagaggaggcaggctccgttcagggagtcgttttccgtggcgaagggcattggcgcgcgcgggccgttccagtcaaaggtggagttgagcagggtttccgcaatgtctccgttcgggtagaagtccgtccagtggcgctggccctggaagccgccggcaatggcctggtagcccagggattcctcttcgcggtcgattttcttgagcttggggttgccctgcatcatgtcccggaagatcatggccatcagcacgctttccttgaaggtcctgcggcgtccggcttcgtccagcttcaggtccgggcggttcttgtcttcggcgaatttgaagacggcgtccgcccattgcatggcgaggtcgaattccgcttcgtcgtaaatcttctggtccatgcggcggcgcacttccgtcatgtccacggcctgcacgcggatgcccaggtaattttcccagaaggactggtccacgatggagccggcgatgcccatggagcagccgccgatggagaggtagcccttgccgcggagggtggctacggcgaggccggcgcggcagaagcgcaggattttttcagccacgtcttccggaatggaggtatcccctgcgtcctgaacgtctttcccgtaaatggagaaggcggggaagcccttctggttcaggccggccagggcggcggccaggtacacggcgccggggcgttccgtgccgttgaagccccagatggccttgggcgtgaacgggtccatgtcaaaggtctcgctgccgtagcaccagcagggcgtgacggccagggagacgccgacgttgttggccttgaatttgtccgcgcaggcggcggcttccgccggaccgccaatgcaggtgtctgcgatcacgcacttgacgggttcgccggaggcatggcggatgttggcctcaatgagagccgcggccgccttggccatgttcatggtttgatcttccagggattcccggacgccgaggcggcggccgtcaatcgtggggcggataccgatggttggtaatgctgttttcatatcttgcgtaggtgatgtgaagctggttcaggcctgggcaggcgcatcctcttcctttttcaaatgggtgttgcggaagaagaagccgtagattagtaccacggcgaagcagatgatgggaataaagaaggatgaccgcaccgctttttccacaaagttttcctgggccgtctggaattgcttcatgtccagggggtcggaaatcaggttgccaagtacctcggcctggttcccggagagcgtggtgagcgccggaatcagggagaattgctgaatttgctgttctctcccggcgggggcgggcaggcggtccaggttggccttgaagaccgccagttcttccggcttgaggccggagcagccgggcagggatttggccgcctggtcaaaggcttccccgtccagggtatggagggaaaggaaggtatccaggtttttctggaatttggcggcggctttggcctgttcttcccccccggcgggattggcttccgacatcttgtagagggccagcatggcgccggagacggatttgcgggagtccgctgcttccgcctgcgcgatcaggggacggtcaatggattcaaagtaggccacctggtttttcaccgtggtgttgtcaatgaaggagcccatgtacggggtgatgaccgcgccccccagaatggccatgatgaggcccgcggcgcccagcttcacttcggaacccagtccgcgcagggcgatgccgtaaatggtggggaacatcagggacatgcagccggagatgcccaccagcgtccagacggagatttccttgggcaggtacatggtgcccaggcagcagaggatgccggcaatggcgaagagggacatcatgttggccgggttgaattttttcatcagggccgtggtgatggcgcggcaggcgatgaacaggacgatggagaagatgtagtagttggacgccgccgcttcctgcatgccggggaagacggacatgatgtacttgatcgtccacgtccagacggcgatctgcacgcccacgtagaagaactgggccaccacgccgcagaagtagcgcggaagcttcaccagcttcatgagctggcagcggtagtccggcatgatgagcaggaaggcgatgggcccgatcatcatgatcaggatttgctgtaccatgccgaattcaaaggtggagtagtactggaacaggaagggaatgaggatgaaggcgacgcacaggcccaggcggccgagcttggaggaaaggggctgcgtgttttcccgggtgggcacgctttcgtcgtcggacttgtaacggcagaagaagaaccagatgacggcggcgatggcgaccaggcccacatagggaacgcacacccagaagagctcgtcgctgacgatggcgttcagttgttccgggtccatggccttgcgggtgtccatgtccgcatcattcaaatgcgccaggatgaagtatttggccaggaagatgcccgtcagggagccgattgggttgaaggcctgggcgaagttcaggcggcgtacgctcgtctcctgggaccccatggagaggacgaacgggttgcaggtggtttccaggatggagaggccgcccgccagcacgaagatggctaccaggtaaatgtcaaaactttgcccgatggcggcgggtatgtagcacagcgcgccaatcatgtagaaccccagcccgatgagcaccccggccttgtaggagaattcctccagcaggatggacgcgaaaatggcaagcaccgcatacgccccgtaaaaggagatttgcacccctgctgattccgaagcgttgatcatgaatatcttgctgaatgccgggaccaggttgtccgtcatgttgttcagtagcccccacagcgcaaaacaggagaccagcatgaagaacggcagccggtactgtttgggaacgatcggcacggtagaggtacggtttttgtccatattgcttttgtcaatctctcacaaggacggcggtgcgtcaatctggaaacggaaaagagtccagaaattatccaacatattgacattgaaaataaaatgacgttccggcattgggatatcctgtcagcgttcacgggagacccggcttcttcttgactcctgtttccgaggtggctaaggatgggccgatgaagaagtgcattcttgccgtttgtcttggactggccggtttttggggcgtccaggcggaagattcacccgtcgccaatccggaaaaaacggatgaaaaaggcgacgtgacgctgccgtccggagaactgctgtcagaccatgtggcggaggcggagtttactgggatcattcaccgcaagtgcaggttccttacctccctctgtccggacaagtgcgaccacgccaaggatttcgcctccttccggatcatcaagtatctggattaccggaaacccggaaagtacggggatgaaaagcaggagcagctgatgattgacgttaatccggcgcacaagcccatcctgcagggggcggacatcctgaaaaaggtagccgccctgaagccgggggacaaggtgctccttcactggtcccattactacatgcaccgggattccagctcctttccggaacgtcccgtgatttccatagagccggcggctccttccagtggaaaaacggagggttgaggactggtctttctacaggccttccaggcagggctggacgcggcgtaaaggcgtgtgttaggaaattggctggcgatgacgcagctccgggcaagattgctccatgctgccgcgtattgtcatgcgaaacacacttatatacataccatgcgtttacctttgaatacattaacggggcttgccctgctatgtgccctgggcatgtctgttcccgttgccttgggtacggaaagctttgagcaggccaaacacggcaagtttacgacgctttccaccaagtacggccccatgtcctgccgggacggcgtggcggaaatcggaggagggggaaaatccgggaaatcttccctgcggatgttcggcggccaggataccgaactgaagctggacttgaaggataccccgtccaaggaagttctgctgtccgcctgggcggagcgctggaccgggcaggccccctttgaattctccattgtggccgtagggcccaagggggaaaagaagatttatgacggcaaggacatcaggacgggcggcttcaataccaagataaagacccatgtccccgccggaacgcgctccctggtgttcaagctgacatctccggaaaacaaggggttgaggctggatgacctgttcatcgtgcccagcattcccatgaaagtgaatccgcaggtggagatggcttcttccgcctgtccggtgatggtgcgcattccgtgcaatcccgttctttccctgaaggttcaaacggagggctgcctcaatccgcagttcctgacggccgtcaatctggatttcacgggcacgacgaagctttccgacattgaatccgtgacggtgatgcggggagacgaggcgcctcccgttctccagggagagaagacgctccaggtggatgcctcccagatactgggcacggtgaagctttccggcgcctccaagccccaggttcccgtgaaggggaaactggagctggaccccggcgacaattacctgtgggcctgcgtgacgatgaaggaaggcgcctccctggacggcagggtggtggtgcgcccggccagcgtggtggcggggaacaagctgatgaaggtggccaatgccgccccggtggcgcagcgcatcggcgttgccgtagtgaagcacggggatttcaattccaaattctaccgcattcccggcctggtccggacgaaaaagggttcccttctggctgtgtatgatatccgctatgaccgttccaacgacctgccggccaatattgacgtgggcgtgagccgctccacggacggaggccgcacctggtccgacgtcaagatcgccatggacgattccaagattgatccttccctgggcgctaccaacggcgtgggggaccccgccattctggtggatgaaaagaccggccgcgtctgggtggccgccctctggagccacaagcactccatctggggcagcaagtccggagacaattccccggatgcctgcgggcagctggcgctggcctacagcgatgacgacggccttacctggtccaagcccatcaacatcacggaacagacgaaggacaaggactggcgcattctgttcaacggtcccggcaacggcatctgcatgaaggacggcacgctggtctttgccgcccagtactgggacggcaagggcgtgccgtggtccaccatcgtttattccaaggaccagggcaagacctggcactgcggcacgggcgtcaatgagcagacgacggaagcccaggtgattgagttgaaagacggctccatcatgatcaatgcccgctgcaactggggcggctcccgcgtggtgggcgttacgaaggacctgggcaaaacctgggaaaaacaccccaccaaccgcactccccagttgagggaacccgtctgccagggcagcctgctggcggtggacggagtgccgggcgcgggcagggtggtcctgttctccaaccccaacaccacttccggacgctcccatatgacgctgaaggcctccacggatgacgccggctcctggccggaagacaagtggctcctttacgatgcccgcaattgctgggggtattcctgcctggcgcccgtggataaaaaccacgtgggcgtgctgtatgaatcccagggtgcgctgaacttcctgaaaatcccgtacaaggaggttctcaacgcgggcagtgcgcgctgacgccgctttcaggtaatcgtttacgggccgtttccttccgggagcggcccttttttggcggcggtctttgggtaggaattcctccaaagcgcaggggagggagttcaggtacggaggacggaaagagaagcttgaaacgcgcaggaggagtgaatctgaaagaggcacgaatcaagcctccgtttcccggcggcggtgtttcttccaggccgcgggaatgtgagtccctggtggccgcgctgctggagcaagggcctccgggtccttgtaaaaaagctttctccggatcagccctttttcctgttccctggccgtcactccagaaaagaagccagcgcgtccttcagcatgttcctggcgcggaacagcaggcttttggtggcgggaaccgtcatctccagcgtccgggctatttcctcgtaaggcatgttttcaaagcggcgcagctgaacggccaggcgcgccttttccggcagggcggcaatcgcttcatccacggcccgctggagttccgtgtgctccatggcttcatccggggcctgggaaggttccaggaacacggtcatgccgccttcctcctccatggcgtccgcggaggtggtgggcttgcgcttctggcggcgcacttcattgaacaccagattgcgcagaatggtgaacatccaggtggtgaagcgtgcggagggttcgtaattcccggctcccttccagatgcggatgaaaacctgctgggcgatgtcctccacctccggcccgttgttcagcatgcgggctacggtggcgtacacggagttctggtgcttgcggaccagcatttccatggcggaagcgtcgccattcctgactctcagcatcagctgggcgtcctcgtctggttccgcaggcggcatgtcttgtgcttcgtccatgaaattcccttctataaaccccgtgtccggtgaaaggttgcatccggaagggcgcatgccccggaaaaaaggtctatcccatttttccgcggctgacgagatgaaaacgggtctttcttctctttccgcacaaggctccggacaaaacgttttgctcctgccgatggccggggacggctgagggggtggaacattccgttcttttcccggtgggaagacggagcgtgatggaaatacggaggccaccctccatgccgctccggtttgacaatgaccggaggggcctgctagggtaagggaaaatgaaagggagaaacgccggtaaattggtctgtttaaggaatcatcctgaattcctttccacagcttccgcctggttcggctccaagtgggatgttcccgtggaggcctatgaggaaagcatgaaggaatgcatggaacggaaaacgggcattccgcaatggtacgtggtcatgaacggacagggggcaatcattgcgggagccggagtgattgaaaacgatttccatgaccggaaggatttaacccccaacttatgcgcgctatttgtggaaaaaaggcatcgcggcaggggcgtggccgcgtccatcctggactttgtgcggaaggatttggccgcgctcggatatccccggctctatctggtgacggacctggcggggttttatgaaaaatgcgggtgggaactgctgacaatggcgacgggcggtcatcgtgcccgggaacgcctgtatacggctcccgccatggaaaccggacccgtttgacgggggaaggccggaacttcgttcttccagtcttcatgcggggggaagaatggggcgggaaggaattgttgcgcctggaataaggaggaaagaaggggggacggacacagtaggcccttccggatggaacgcgcctgcgggaggactctgttcttgacagcatttcctgtctgcctgataacttgatgatacagatacccctaacagtataaggaaacgccgcaatgaaacaatgcatgaattctgaaaatttgcatcgccgcctcaagaaaatcatcggacaggtgcaggcgatcgacaggatggttgacgaggacgttccctgtgaagatgtgcttgcccagctcaatgccgccaagtccgcattgcacaaggtgggccaggtcgtgctggaggggcatatcagccattgcgtccgggacggactggagcacggagacccggagcagaccatcgcacgctttaccaaggcggtcgaacggtttgccaacatgatttagcaggagggttcaagagacttttttcaaccgccatttccggggatttttccgtctcatcttgacaaacctatacccctataggtatataaaacccgtacctgcatgggtatggaaaggagcatcatatgctggaacgattggaaaaactgctggaatggggagggacaaggcgcgacgtcgcgctgctgtccgtttccggattcgcgctgttgttgagcatgcttgatattgaaccgcttccctttggcgtcgcgtggatagccattgtgctgtgcggcgttcccatcgtgctggaagccgtgcttggactggcggcggcctgggacatcaaggcggatgtgctcgtttccatcgcgctggtcgcttccgtcatcatcggggaggactttgccgcggcggaaattgcgttcatcatgcaacttggcgcgctgcttgagaacctgaccgtggccaaagcccgggcgggaattgaaaagctggttcatctgaccccggctaccgcccggaaagtggacggcttccgggaggaggtcattccggcggaacaggtatgtgcgggggacgtcctccgcgtgctgcccggagagacggttccggcggacggagtgattctttccggccatacttctatcaaccaggccgtaatgacgggtgaaccccttccggtggacaaggaagccggggacgaggtttccagcggaacggtcaaccagttcggagcctttgacatgaaggcgtccagggccggggaggacagttccattcagcgcatggtccatctcgtccaatccgcggatgcgggaaaggccggaatcgtgagcctggcggaccgctgggccacctggatcgtcgtcattgccctggcttccgcagggctggcctggctggtcacgggcgaactgatccgctccgtcaccatcctggtggtattctgcccctgcgcgcttgtgctggctacccccacggcaatcatggcggccatcggaaacgccaccaggcatggattcctggtgcgagagggggatgccctggaacgcctggcctccgtatcccacctcacctttgacaagacgggaacgcttacccacgggacgccccgcgtggcggcggtacgcagttttctgccggacctccccgaacaggtgctttacaggtatgccgcctgcgcggaactgcggtcggagcaccctctgggcaaggcggtcgtccgctgttaccggaagggagaaacgcgggagcttccccagccggaacagttccgcatgattccggggagaggcgtccaggccgtcctggacgggagggaactgatggccgggaacctggaattgttccgggaaaacgggctggaggtgcccggcgaagtcagaagggcggcggaacagtaccaaagggagggatgcaccgtgattttcctcggcatggaccgtaaggccgcaggcttcatcgccctgtcggacaccctgcgggaggacgccgtctccaccatccgggaagtggcggaaaccggggtggttcccgtgctgctgaccggagaccatgggaatgccgcggcccatgtagccgggcagctcggcattgagcgggtttatgcggactgcctgccggaggacaagttcaactggattgacgcattccagaaggaacggaaccgggtgtgcatgatcggggacggaatcaatgacgccccggccctgaaaacctcccatgccggaattgcgatgggaggcataggcagtgacattgccgtggacgccgcggacattgtcctggtaagcgacgatatccgggaactcccccatctgctgcgcctggcaagacgcatgatgcgcacgatcaagtgcaatctgacgttttccatggccctgaacttcatcgccatcatgctggcggtgggcggaatattgaatcccgtggcgggcgcattggtccataatgcaggctccgtcgtcgtgatcgtcaattccgtctttctgctgaaatgggggaggaagaagagcatggctccccacggcgcgggggaaacagctccataacggggggagaggggagtatcgcgcaccctgcggacgcatgatatcaagttgccgcattggcatgcggcgctcctgcgtcgtgggtttggcacccggaccggaaaacgcttggatgggacgggagcccgtgctatctttttcccaagttcggcaggggtgcccaaacaaaggctgagattgcgggaacggcatgctgttcccgcagaacccttcaaacctgatgcggataattccgccgcagggagttcgattgaacgggcatgccccgtttctcgggaaggtctcgtttccgctgttcccctgccggcacagaacagcatccattccatgaacgacaccgccaatttgacctatcccggctcccgacgcatttatattccgggccgtctgcatccggacgtgcaggttcccttgagggaaatcctcctgagcgataccctgctgccagatggcaccgcccactccaatgtccccgtgcgcgtgtacgattgttccggaccgtggggggatgcggcttatgatggaaccgcggagcaggggcttcccgccctgcgcgctgcgtggatccgggcccgcggtgatgtggaggaggcggaaacggaccagggccgctgcctccgggctgcggggggcacgcctgtgactcagcggcattacgcccgccagggcgtcattacgccggaaatggaatttgtagccatccgggaaaacctgggcagggaagaagcgttcaaggcggtgtatgaccgttatccgaatgccaagagccgcccggacgaagcccgggaagtcctggaggcgctcaccatgatgccgcggccgtccgaactcgaggcgcaggaaggcttcggcccctccagcatggtggcccgcgaccggctggaccaccagcacgcgccggaacgccggaacggctgccggatgcccgcttattttacgccggaattcgtcagggatgaaattgccgccggacgcgccctgattcccgccaacatcaaccatcctgagtgcgagcccatggccatcggccgcaacttcctggtgaaaatcaacgccaacatcggcaactccgccctggggtccagcattgaggaggaggtggaaaaactgcgctgggccatccactggggggcggacaccgtgatggacctgtccaccggaaagaacattcacgccacccgtgaatggattctgaggaactcccccgtgcccatcgggaccgtgcccatctaccaggcgctggaaaaggtgggcggcaaggtggcggacctgagctgggaaatcttccgtgacactcttctggaacaggcccggcagggcgtggactatgtgacggtgcacgccgccctgctgttccggtttgtgaaccacaccgcccggcgcatgacgggcatcgtctcccgcggcgggtccatcatggcgcagtggagcatgatccacgaacaggaaaacttcctttattcccactgggatgaaatatgttccattctggcggcttacgacattgccgtctccatcggggacggcctgcggcccggctccgtggcggacgccaatgacttcgcccagctggcggagctggaagtgcagggggacctgaccatgcgcgcgtggaaagcgggcgtacaggtcatgaatgaggggccgggccacgtgcccatgcacctcattgccgagaacatgagcaagcagctggaatggtgcatggaagctcccttttacacgctgggtccgctggtaacggacatcgcccccggctacgaccatatcaccggagccatcggcggagcgatcatcggccagcgcggctgcgccatgctctgctatgtgaccaggaaggaacacctgggcctcccggaccgggaggacgtgagggaaggcgtggtcacctacaagctggcggcccacgccgcggacctggccaaggggcacccgtccgcccagtggcgggacaacgcgctggcgcaggccaggtttgaattccgctgggaggaccagttcaacctttccctggacccgcagaaggcgcgttcctaccacgacctgacgcttccccatgccaacgccaaaaaggcccacttctgctccatgtgcggtccggacttctgcgccatgcgcctgagccaggacatccgccgccggtcacggcagtagggggaccgaaggcgcggcgtcacggtagccgccgggctgccaggagcgggaacgtctgaaaaagaatgacaagggcagggatggtgctatgatgcctttaagatgaagaattcatttttttctgtccttggcgttctttctctggcttctgccgtggtttgttccgcatctcccgtctgggagacggattggagcaaggctctggagaaagccggcaaaagcggacagccggtgctggttgacttcaccggctccgactggtgcccggggtgtatttatctgcggaaaaatatttttgatacggacgccttcgccaagtatgcgggagacaacaacttcgtgctggtggagctggattttcccaggacggaggggaaaatgcctccggaacagctcaagtttcatgaggaattgatgcgccgttacggaatctccgtgtttccctccgtcctgatgatggaggggaatggcgctccctatggcaaaatagtggggccctccagaacggtggaggaatatttgaagaaactggaagccgccggggagacgaggctgaagctgaaagaagccgtggctgcggcccgcgcgctggagggaaaggaaaaactggaaaaactggtgcaggccatcaagctgcttccggaggatttgcagccctatcagaaggaattgatcgcggaaatctccgccctggacccggaggacaaatacggatttgccgggaaggctgaaaaagccgtgaccctggcggcgcagcggctcatgatggagcaattctacaaaaagcacgcgggccccttttccgcagaaaaaatccgcgcgggacaggaggaagctctgcaaatgctggaaaagcgggacctcctgccgcccatccgcctggaaatagccaaatacgtcagcgacgggtatgcgctggagcgcaattatcccaaggccctggaatacctgaacatggcccgtgacgccgatccggaatctccggcggccaaaaagctggagccatggatcaacaatatgcagaaaataatcaataaggaaaaataagcccttttcaggaaggcattccctcttcccgtgaagaggaaaactatattccgtcttttattttaaacaaaaaaatgaacttgccgcgctatgattgatgaaggaaccgaacatgcagaaatgaatacgtccgcctacatcagggaagaggaagttaatgaagaagacagccatttgctgagctgggatgaatggctgcggaggcacgtcgctcaactgctgctgtttgcccgccagcagtcccgctctccggaagatgcggaggacatccttcaggatgccctgatacggctggcgcgcaaggaggcctccggagaatttgtgggagggcaggaggcatggctttcctatgtctttgcctccatccggcgtctggcggtggactatggacgcaaatccgaccggcgccagaaaagggaggatgaagcctgcgccgccgaacaggacgaggatgtttatgcggacccctggttttccagcgccgcggcggacgaggagctcaagcagttcatggaaatgcagctcaggaagctcccttccaaattctccgaggtcattgtcctgaaaatatggggggaacaaacctttcagcaaattgcggaaacgctggaaatctcacagaacacggtggcgagccggtaccgctatggcatcgacctgctccgcaaggcgctgagaaacaaaaaagaccaactctaatgccgctccactcttatgaaacatgaaacaacatcatccgccgcaggggaggaaggcggcggtactgccgccatgcagccccttcccgtatccgatgaactgatttcccgcctggccggaaggtgtgaggaaatcttccctctgaacgaccgtctccggcatgatgaaatctccgatgaggaaattcatgagatggaatcccttttgaagcgtttgcggcctgccccggtgagggttctgttccgggaacaatgctgttccctgatgtgcgccgagtccgaacaagaaatggaaacccggctgaaaaggctttccgcctcttccatgctggaattctccgtgtgcaaaatggcgcaggccatggactgcgccggagaggcgaagcaggaaaaagcggtgaaaatccccctgtggcggcggcttgcctatatttcaggcatttccgtggcggctgcggtgggcgccgttctgctggttcaaaatacgctggtagcgcccggaggcacggtggccggagggaatgaggtggaagccggagctgaaaagacggaagcccctgtactgcccggggaaaagcgggagctgctgcggaaacccactctttttgaattgcagggcggagacgagcgcgtgcccgtgattgcccctgccgtcatccgtagaattcttcctgaaaaggaatattaaacgaccgccgcgtgaacgcctgtgggcagcgcggttgaaattttccattctgttgctgcaagtgttcgcgctctccggtcctgttccttgttccgcgtctctgctttgtgaagaaaaagaaagcgccctggatgcatggcggagctcttttcccatgcccggaaataaatgttctaccgggagggaaatctccctgccggtggagggaaaggcgtccggataaaggtctcacccaagtgtgggttggcttggctttactcccgtgatgcgttccttggcggtctgccgacgctgcgggacggaaggggacgggcggggccctgcaaaaaaaatgcacaaattttgaacattgcgcggacggatgctgtatattatctcacatggatatgaaaacctgtatctttctgacattgggattgctgataggttcgggctccggatattccattgaccggcccgcaggaagtacggacaaccttcagccgccgcccttgactccctacacgccgcagaccaagcctctcccctcttccagaccggccaggctgggcattgtgcccggcacggtgccgcaggcagtcgtggctcaattggaactcagcggatttcccggcgtgctggtgaccaaggtgatgccggacagccccgccgccaaggccggactccaggaaaacgacgtcatcatcaagctgggggacatctccctgtccggcccgcgctccgtgacggaagccctgtctgaaaaagttccgggagacaagatcacggctgtattctaccgcaagggcaagcgggaaacggcggatatcacgctggacggcggaacgctttctgcggaagaaatactggcggcccagggagatccccgcacccagccgcgcgtggttccctccgtccggcgccaggcggttcctcccgccggaatggccgcacggcccaaccttccgcagcgcattctggacatgcagcagatgatggatgattttttgagggactccgcgattgatgattcgcggatggatgacatcatcggccggatgaacctgaccccgggagcggcccagatgctccggagcctccagaaccttcaccagatgcccatgccccccatgggcaaggtgtccggcggagggcagagcacgtcttccgtccggatgtcggacgccaacggaaccattgtggtttcttccagctcccaggcgggcaccaccgtccatgtgacggattccgcgggaaaagtcctgtactccggcccctacaacacgccggaggaaaaggaagccgtgccggaagccgtcagggaacgcctgaaaaacatagaaaccaacttctgcttttaacctcttcatgaaacaatggagaaatccatgatcattatgttaaggacggctgccctgtgtggggcagcctttttcatgcagaaaaggggctttttcctcttctgaaaaagcggcgcgttccgggaagaaaaagcacggaacagcagcaggacatctattccacatccggaggaaccgccggaagaagatggaaggaaaagaaaggggatatcttgcggcctccctgtgggcagatcttgaactccttttgaaaagcggagtgcggcaggaactacagaatgccggtcaatttccggtacgtctccagcgcgaaggaatccgtcatgccggaaatataatcaagcatgtgcgccaggcgtgcgtccttcccttcgtcatccttgggcagaccggttccctgaagcatgatggctacttttttagactgtccggaggaaggatggttcacccactccatgaaaaagtcgatcagctctcccagcaccttgtagcccatggcttccacttcaatcacctcccgggcctggtacacgttctcaatggcgtaccggtacaatccgttcagcggcgcggccagttcagaacggtcaatcagggattgatccatgctcccttgcagaagctcctcttcatgcttcatgaaactgtccacggcggactggatgctcctgccgatggcgagcgcgcgcatgtaatggatgcaggattctttttcatccttcttttccagttcccggacgtagcaaagctgggattccgtcaggaaagggctgaataaatccctggtaggctcaaaatccagaatgccggaaaaatacccgtcttcaatatccgcgatacggtagcagatatcgtccgcggcctccatcaggtacgctaggggatggcggcaccagcaaagatatttttcatcaggcgcggaacggggaagcagccccagatggccggccacgaaggaagccgcctccctctcctgttccccgatgccgaacttcttgcattcaagcttgttggctgccgtcatgccgcctttcctgacggccgcggaataggattgcgtgcagggatacttcatgaaggcgcccagaacggcagccgtcagtttcaggccgttgccttccatcggatccccggtgtgggtaaggatgcggaacccctgggcattcccttcaaacggcatcttcaggccgtgccgtttcagggcggtttcaatggcgtcctccccggaatggccgaagggcggattgccgatgtcgtgggccaggcaggcggtggaaacgatggtggccacgtcggaaggcactataggagcgggaagggaacctttctccgccagccactctcccgccagcatgccgagggaggagccgatgtgggccacctccaggctgtgggtcaggcgggtgcgaacgtaatcattgcggcccagggggaaaacctgcgtcttgtcctgaaggcggcggaaagcgctggaaaacagaatgcgcccgtaatcccggtcgtaattgctgcggtttttctgcggagacgccgtactctggtgcctggacccccagcgggcgtccgacaaaagctgctgccaattcatcatccctgacatggtgaaggaatgctacaggggaatgcccggctggaacaggagaaaatgggggaaggcgttcaataggtcagcatcagccccactccccagtgcaggttgttgtcgtaattggtggaaacgctgagatgggaggtcaggatgtagtgcaggcccacggaataatcccggtccgtattcagggaaaaggaaaggcgcaggcgggaggtgagcgggatatcgtccctctccaattgcaggcgcgcctttccgtccgtatcaatgcgcgcatccccaatcaggagcaggggcagcgtataccggacgcccagggtgccgtccacttcccggtcctttttggtggtctggcggaacatgttgcgttctccggcctcacccttgcggcaggtccagtccaccccgatgtaggggtaaagccactgcttctccccgatgtacctgcccagccgtccttccgcctcatagccgcgcgtatccttgtagcctatttgccactctccctgaacgctccagcgggtgcctccgaactccaggtctccgatgttcccgttggaggcgaaatcattgttcacggtcaggtaccacttccggtccatgtcgtaaacgtgctggagcgcccgcatggggtgtggaagctgcggattggggggagaatcctcatacgtgaaaatccgccccatgccgctcatcatgtggtacaggatatggcagtggaaaaaccagttgccgcgcgtcttctccgcggcgttgaactcgatcacctgggtggccatgggctggatgtccaccgtgaacttgagcggggaaaaatccccgtgcctgttcaccagccggaaaaaatgcccgtgcaggtgcatgggatgcctcatcatggtattgttggtcaggatgatgcgtacattctgcccttcctcgatcatgatacggtccgtctctgaaagagtcttcccgttcatgctccacacatagcggttcatattcccggtcagcatgaaatgcaattccttcacgggcacgccggaaggaaggttggtgcgggagggagacttcagcatgtcatacgtcagggtggttccctccccgtcctcctgcatgctgccgtggcctccaccatgggaggaaccggacttcatgtccatcatccccatatctccggaatgggaggccgacattccgccggacatgccgtggtgatgcatctggcgcatggaaccggaattcattttcatcatcttcatgttaccgcccatggtcatcattccgttcatctgcttcatcttcttgaagtaattcagcctggggaaggggcgcagcggctgcctttccccatggcccagccacagggaggaagacccggaggtatcctccgccgtcgcctggaactcgaaagccctgcctgattccggtaccgtcaggacgacgtcgtaagtctcggaaaccgcaatcatcatgcggtccacgtccacgggaacgacgtccttcccgtcgctggccaccacgcggattttgccgcccgcgtacctcagccagaaataggtggaggaagccccgttgacaatgcgcagcctgaggcggtcgccgcccttcagccgggacagagaagcctgcggagagccgttcagcagaaagcgttcgtaatacacgtcgctcacgtccatggcgttcatgcgcttccattcgctggtcagcttggtttccaggtagccggcgcgcagggcctcccagtagctctgcacgctccccttgcggatggaaaaccagtccgacccggtgtgaagcttcctgttcacctcctggggattctcgttcgtccagtcgctcagcaccagcgtatactccggcagggcgtcctccgtcctgcgcgccgggtcgccgggccgcttgcggacgacgaacgcgccgtacaggccgctctgctcctgaagtccgctgtgggaatggtaccagtacgtgccgttctggatgatgggaaaagtataggtatgcgtggtgtggggctttaccggcgcggaagtcaggtacggcaccccgtcctggtcattgggcaccagcaggccgtgccagtggaaggaagtctccgtatccatcaggttgtgcacccgtattacagcggtgtccccctccgtaaaatgcagaacggggccgggaatgcttccgttgatggtcatggccgggcgcgtgaccccggtaaaattgaccggagcgttccggacgtataaatcgtattccaccgttttggcgagtgacggagagaactgggccatcaggcagcagcacaggaatgggaaaaaatgggaggcgaccttaaacatgaacaggaggaaagtactgccagaaaagacccgttcattccatctccggttcaaaatgaaacggatgtgatgtgtcatgtctttcctggagcatgaaaggagaatctggaaactggcgcgggcggaaatgacaagggtgcgttattccggaatccggccgccggaagcctgtttctgcgcagcctttttgagaggaatgggcgcgatcaggaaagaggacaggataagcaggcacccgagagccaggaggaacatattgggctgttcccggaacaggagcagggaaatcagcgccgccaggggaatcttgagattgttcatgattgccagcttgacgggcgttacccggcgggcgccgtaattccagaggaaaaagcagactcctgaagcgatgactcccaaataggccagcagccaccattgcatggctgaaatctcctgccagcaggccagccctgacggcagtccggcaggcaaggtaaccagcagggcgcctgcgtaggcataggcgaagcaggaagcttcacttccgccgaaccaggaatccttcaaggaaatgtaggcgatttgccctgccgcgaaacagaggttggaaagctgtaccagaacaattcccgtgagttcgccattgccggcggaataccctttccaaaggatgcccgcgcctcctatggccgcaagaacggccgccgccagatggagcggcggcagcttcttcttcatcaggccgttgaccagaaccacgtaaatcggtgtagtggccgtgaaaagggcgacctggtgggaaggcagataatggaaggctgcgatatagcagaggtacattcctccgaattggacggcgcctatccccatcatccccattgcatggctgaaaggaaccttccggacgaaggggaggaaaacggccagcgagccggccatgcgcgccagcgcgacaaaactggcggggaggtcggacaggcagttccccagcagtccgaatgacaacgcccagatgaaagacgtgaccagcagcgcaggcatgagggcggaagcatacggagaaaggaaaaccaagtcaatgcctgtggcgcaggaacagttgcgagaagaattctttccacatgcaattttatggaaagaaaggatgtgggtacatctgcttcgccaaatagagaaaggacagattttcttggtggatattttgttttggcaagggagaagaaaaagttggacaacggtatttaataatgaaaataaaaatgttacaaaagttgaaaaaatgattttgagggtatttggacttgaactatttttggtggctttttataaagatgcatgaacttttggccccttgccgttttctctgtatgtgccgtggcatctgtatcgcttgctgcggaaattcctcaggaagttcaggcattggatcgcatatatcagaaacggtgcacccaggcttgcgcccctcatattgctgcttttactcagaaagcgttggtattgcagaagaaatgcgttcaacgctctgattttgaaggggcgaaagtaattcatgacggtcttgaggaattaaagaaaaacaattttgactggcgattggtgaaggaaacttgccagatttctattcctagggatggatggtatggttcggttgctaatatgatccataagctggatgctgagggcaaccattatgatatacaggaattccgtaaaaaatttaaaaacacgggcgagaaggttaacaccgaactgacgggaccggatctgatcgtatttacaggagctccgaacaggttgtggctgatcattgattcccggacgatttttgaaatttatacaaacaatatcgttgcccgtttgatacatgattcttccaaagagggaaccaatgtaggaagtgcggatgaaataaaagatgccgagtggctgcagatgcagaacgatctcaagaagcggtgttttcaggcatgttcggaaataacaaaaaaatatatccaggcgttagacaagttgaagctgaaattatcggctgacggtgatatgacagctgctgttgcagtgcatgaatacgcaaaacggcttgaaagcggcaacctttctccagaacgggaccgttccttgaaaacctttgaaggaaactggaaggatggttccggtctgacttaccgttttaatgggcgtggagaaggtacagttaaaaagtctaacggtactactgattttacgatgactcctgtccgttcttctccccacggggatttccatttttttaatgtttcttccggaggctctcggattgcaacccgggtggccgacaaggtttatattatcatgcaggatggaagaaaggattggctgcgcgtgtgtaaacgtatcgggaaataacattgagaaaatacatggaacccagccgaactgcagaactgagtgcaacatcgttgaaggcatctcgaaattgagcctgaaggttcgttcttatactgcttttctaggtggatgcaccctcccgtgccaggcagacggcaaatcatcatccgggtgcagggaagcatcggttttatcttttcgctatcagccttctgttatccgctaaaataaagcctggcggggaaaagaaaaacgctccggaatgcaggattccggaacgtttatgaagatggtacgcggtactggtttcgaaccagtgaccccatgcgtgtgaagcatgtgctctaccactgagctaaccgcgcatttgcagtgcggggggaatatatcgttcatgcaggggattggcaaggagttttttgaaggcaggtgaaaaagagggaatactttccttccgtcaagattcccggattcattcctcctgactgatgtgcggctttgtccggattccgttccggaaagtgggaaggtggctcaattccggcttgtacagcatcaaccgtcttcctacactccgggcatgagttgcacaagccctcccagagcatgggcccaggttgataccaatgcgttgaggcacaatctgaacgtcgtccgccgcgtgatgccggaccacagcctgatggccattgtgaaggcggaggcctacgggcacggactggaaggggtagtgaaggctctggatggtgaagactgcgcttttttcggcgtcgccacggtggcggaggctggccgggtgagggatgcaggggtgaagacatgcccgttcattctcggtccctgttttgccggagaacgggaggagattgtgcagaacggctggcgcgccgccctttccagcatggaggaggcggaacatttcaattccctgggcgccctttacaacaagcccgtccatgtccatctgggcgtggataccgggatgggccgcagcggctttcttcccagtgaactgcacggcctgacggagaagctcaagcagttcagccatctggatctggagggcgtgttttcccacctgtccgcggcttccgacgatatttccttcacgcacgggcagatcagcggcttttcggaggccgtgaacgaactttcccaggggcaccagtacaagttccggcacctgtgcagcagcgcggccgtgttcaattacaaggttccctgcgccaacatggtgaggctgggcagaatcctgtacgggtattcccccatgccgtccccgtacaacaaggagctgcggcccacgatgaccctgtacagccgcattaccctgatacgcacgctgccgggcaaccatggcgtttcctacaaccactgctatatgacgaaggggagcacgaaggtggctaccatcggcatcggctatgcggacggctacctccagtatctttccaaccagggcgcacgcgtgtatatcaacggccagtactgcccggttctgggccgtgtgacgatggaccagattatggtggacgtcacctacatggaccaggtggagaccggggacctggtggagatcatgggccctaatgtaagctgggaggagctgacgcgccgcgccagtaccatccccagcaatgtgctgaccagcatcagtgcccgcgtgccgcggatttacgtgtaaggggccgcgggctgtttcgcgctcgtttgtttttttgacgggatggcaggcaccgaagccgcaaagctgcggtgaaccggtgtttccgctatcgcctttaaaggcggtgactcttccgggagtgagggagttgttcccctcatggctgtttttcctaagcggaacagaggctttttgttggggtatgctgtccgctggccggagaaaatttccttggctgcgctctggatggatttttagttatgaagggcggggaggccgtcatccccaggcttcctgaaccgtaaattcatggttaatcagcatttccgccatacttcttggcagccggaattttcttgaaatgggaggttttacttctgggagcgccttttccaataggtaacggatgcgacgtttttccgcgcttttaccgctggcgcaccttgttccagtcctccggctccagggagcaggggtccggggctacccagtggcccggttctatttccacgggggtgagatccgcacccaccgtttccggataggaggggtgctggatgcggtggccaaaggcggagccgagcggcgggttgatgggggagggaacgtcccccggcagaggctggtgcttgttggctctggcgggatccggttccgggatggcgtccagcagcgccttggtataggcgtgtttgggggattggtagatggtttccgcatctgacatttccacgattttccccaggtacatgaccgccacgcggtcggagatgtgcttgaccaccgccaggtcatgggcgatgaagaggtaggagagcttgcgttcttcctggagttccagcagcaggttgagcacctgggactggacggatacgtccagcgcggagacgggttcatccagaatgatgaggctggggttcagcgtcagggcgcgcgcgatgccgatgcgctggcgctggcctccggagaattcaaaggggaagcggtcgatggcgctgtccggcatgcctacgcggtccagcaggcctcgcacccattcccggcgcgcggcgggcgtgcccatgcggtggatgacgaagggttccgccacaatctggccgatggattggcgctggttgagggattccgccgggtcctggaagaccatctggatgtgggggcgcagggggcgcattttgcgctgggagagcctggcgatgtttttgccgttgaactggatggagcctccggtgggtttcagcaggcggacgatgcttttcccgatggtggattttccgcagccggattcccccaccagtcccagcgtttcaccggggtagatgctgaaggagacgtcgtccaccgccttgacccatcccgcctgccgcaggaagattcctgagcggacgggaaagtacattttcaggttgttgacttgcaaaagtggttccggcatggatgggagaaaaaggaggttaaaggtttgcgcagcgggggcaggcttccacgaagtggtccggggatatttccacgagaggcgggcgttccgtgagttcttccacgggcactccctggcgctggcagaagcggcagccgggcacaaagtccgcaatggaggccacctgtccgggaatggtgggcagcttggtcttgcgcacggagctcaactgcgggatggaggccagcagtcccttggtgtaggcgtggcgagggttggcaaagagttcccggacgggagctttttccaccacgcggccggcatacatgaccaccacggagtcacagctctgcgcgatgacgcccaagtcatgggtgatgaggatggaggaggagcccatttccgcctggaggtccttgaggagggacagaatctgcgcctgcacggtgacgtccagggccgtggtgggttcatccgcgatgatgagttccggatggcaggccagagcaatggcgatgacgacgcgctggcgcatgccgccggagagctggtgggggaattcgtccacgcgctgttccggcgcgggaatgcggacgcgctgcaggagctggatggcggcatcacgggcttccctggcgttcattccccggtggagcatcagggattcccctatctgcctgccgatgctgtgcacggggttgagcgccgtcatcggttcctggaagatgacgccgatgtggcggccacggatgccgtgcatgtccgtctccttcgcctggaccaggtcacggcccttgaacaggatttgcccgtccaggattttccccatgggctggggaagcaggcggacgatggacatggccgtgacgcttttgccgcagccggattcccccacgatgcctacgcaggttcccttgggaacggtgaagctgacgccgtccaccgctttcagcaggccggattccgtctcgaatccggtgaccaggttcttgatttccaacaggggttcgctcatttgttatttctccgtggcagagggttccagcgggccgccgttttccgggatgacgggaacggacggcagcttgccgccgccttccttgttatccaggctgtcgatggagtccatatagcggtactggtcgtatacggtgtccacttcctcgaaggtttttcctttccgcttggcttccatggtttccttcttgacgtcgttgtccacccagtacaggtagctttccatcgggtcaaacacgaccggatggcagaattgcgtggtggcgctgttcggccatttgacccagcgccagtagcccagcctgacgaattccgtggtccagcaggggacccacagggcctcgtcatgaattttctgctgcaccttccacgtggccttttgaagctcgtcttccgtagcggcattcgtttcgtcgtccagcagcttgtccatctccttgtccgcataagcgcagatgttgttggtataggtgatgaggctgccgcgttcgtcataggcgtagcgggagtggaagccctgctcgttcatcgggtggggcggggtgaagccccaggccatgaaggaggcctggacgcgcttttccatgatcttgcggaaggccacggtggagtccagcgggtccagctggatttccaggccgcacttgcgggcgtcttccttcagtttgcccagcgtggaggccagggagggggaggaattggggaaggtgatggcggcggtgagccgggtgccgtccggcttgcggaggattccgtccgggcacgggatggtgtatccggccttggcgaagcaggcgcgggcctgttccggagagtaggggcgcgccttgatgtaggggttggtgaatttgccgaagccggagttgtaggagttgagccgctggtagtccccgcggaaggtgatgtcaatgatgttctggatgttcagcgcatgctggaagcccaggcgcacgttgaggtcgttgaagggggccttggaagtgttcaggaagaggccgtacggaggccgggggtaaatggtgaaaaacgtgctgcggttgatatagccgttgtggacttccgggatttccatgcgctcatgccacagctccggcttcgtgatgttcagcacgtccagctccccgatgcggaagagttcaatggccttggacggttccgcgatgaagttgtacacgatctggtccacgttatacatgtacttcgtgaatttcttgtccctggcccaccagtccggcacgcgctggagcgttacctggcggccgcggatgatgccgtccggcttcaccacgtaggcgcccgtggtaggcggtacgcgccactggtagcgttccacgtagctggggccgaattcgcagtagaagtgcggcggggaagggatgaacagcgtgcagtagaacgggagcagcggcttggcgaaggggagggtgatggagaagcggttgtcgtcgtagatggtgatgttggacgcgttctggtagaagaagttgttgtagaagacgtcccggctgtattccgaggtgcggatgtacatgttcaccagcaggtcgatggcctttaccttggctccgtccgagtagcgggcgtccgggtccagctcaaagtaaacggtgcgcctgtctgcggattccgcccatttgtgggcgatgccggggatgatttttccggtgaccggatgaatggagacgaggccgatgatgatttcatcatacagcgggccgcggaagccgctgttgctgttcgggccgttgggccggaacgtgtccgggtaggaccccggagcccattggcgcagcacgccgccttttttggcgttcgggtcgcctatttccggattgtccagcccgtcttcccatttcaggtcctgggggatgtccgccggagtcttgaatttgatgtagtccccttccgtctgcctgcggtggatgacggacagggccgcttcatcagcaatgagcttgctttgcagcttttccctgattttggggtcttcctccttgaagaatttgtcccggagttcccgtatttccttctgcttggcggcttcttcccgcgccagccggtcattgatctgcttgttccaccgttccgggaaggagtcaaatcccggagggagcgtgccgaaaggcacgttcggctgccagcccaccccctgggattgggaggaatccttgcaaccggaaccaactgccagcagaagggacagcgtcacggaggaaaggatggtgcggaggatggtggacagcttgagcatgggtatggcggaaacaggagtctttttatttataggtggtgaatttcttggggtcgaaggcttcccggatggcctccccgatgaaggtgacgagcaggagggtaatcaccagggcggagaaggcggaggtgaccacccagctggcggagaggtccgccaggccgtcattgagcaggcgcccccagctggcgtacgtgtccggaaggccgaagcccaggtaatccagggaggccagggccaggatgagggcggagacgctgaacggaaccagcgtgaccaggatggcgacgaggttggggaggatgtggacgaagaggatgcggctggtggaagcccccagcacgcgggccgccgccacgtagtcgcgcgccttttccttcatggtggaggttctgagctggtaggtcatggccatccacccgaacatgatgagcaggctgataatcaggaacatgcctttcatgtgaagcggcaccatgtctgagatgatcatgataatgaacaggaagggaacctgggagaagatttcaatgaggcgctgcatgccgagatcaaacatgccgccgaagtagcccatcatcatcccgaaggtgatgccgatgaagtacacgatgggaaggtagaagatggcggccttcatgttcacctggagccctccgtacaggtacgccaggatgtccgcaccctgggtgttggtgcccagcaggtggcctcccttgaggggtggggccgggtggtagaagatgcggctgattttgttctcgtccgtctgtttcaggaagtcctccttggtgccggggccgctgtagtgttccgctacgatctggttgttttcatacgtggcgctgtacacttccgtccggtcttccagccagccggtggcgcggtccacctttttccccttgcggaatttgtagctgatgtggggaagggcttcttcatccttgtgcagccgggaagccaggccggaatacggcttgccgctggactcgcagaccaggccgtcttcattcaccgtcagggcttcagaaccgggattggtggaatcccccgtggggtcgtacggcaccaggggcatgatgacgagggagggttttcccggctgccctgcctgttttttcagttcgcggtagttggcttccgcatccgcaaagtccccggtctggccgaaggtggagcctttgtaaaccttgcgcatgatggcggggaagtaccaggagccgtcctgcacgacgagcagcgcccgtttgcccaccaggcactggtccatgcaggccagcagcgtcagtatgagcaggatgatgagggagacatagccgcgggagatgcttttaaagcgctggatgcggcgtttcgtaatcggcgtgggatggaagcggcgcggccctttcagcatgatccagaagccgaccccggccatgaccagcacgcaggcccagccgaaccacaggaattttccctgcggcgtcaggatgccgccgttgttctggtccgtgcagacgatgttgagcatgctcatttcacgcgagacggtgaagggccagctcaacgtgggcaggagcaggccgcacagctctcccacggcggtgaggaccgccagaatgaccagaaggtatgacagttttctaaccatgtgtgttattcaaatttaatgcgcggatccacggcggccacgatgatgtctgaaagcaggttgcccagcaccatcaggaaggaggtaagcagcagcgtgcccatgatcagggcgtaatccttgtccatcagggcctgatagctcagcatcccgaagccttggatatcgaagaccttttccaccagcatggagccggccacaataaggctgatgaggctgcccagcgtggaggcaatcgggatgaaggagttgcggaaggcgtgcttgataacggcccccttgaagctcacgcccttggccatggccgtcctgatatagtccgcggaaaggttgtccatcaggttgtttttcatcatcatggtggtgatggcgaaggagctgactacataacagatcaggggaagcaccgtatggtgcagcaggtctccggcctgttgccagaagcccatgtccgcaaagtccggagacgtaagcccgcagagcgggaaccattccagacgcgcgcccagatacaccaccagcacggcgcccagcgcaaagccgggcacggagtaccccaggaaaatcagaacagaggagatgttgtccaccaggctcttgtggcggatggcctttattactcccaggggaatgcagacggaataggtaataatggcgctcagaatgccgaagtacagggagacgggaatgcgctccttaatcatgtcccacaccggttcattgtatttgaaggagttgcccatggtgccctggagcagcccgtcaaagctggtcttatacatcacggcgcgccaggcatagccgcgcgccttgtccctgacggcttccgtattgtccgtctgcctcatgcggcgcgcccagcgttccgcgcggtccatgggggaatctatgtccacggtccagccttccgaggcggctttccgggacggagtgccggaaaagaaggcgtccttcacgctgttggaatccttgtcctggcgcactacgacgacctgttctcccgtttcattcaggttgatccgggtgtgcgtatcggaaatgccggaatattcatcttccttgtccgccgcttccacgccgccgatatccccgaattcctcacgggaaatgaaaatctttttggggagcactcccagccattgcagataggcggtgatgatgggctcctgaaggctgtactgttcctccaggcgctccatatccgcttcgctcaggttattgtcgccgcgctgggaccccgccttctggccggacagggcgctcatgctctgctgctgcatcatctgctcaatgggacctcccggaacaaagcgggttatgcaaaagacgaggaacgtgacccccagcagcgtcaggggcatgagaaggagtcgtctgatgatgtaggtcttcattcgtcgcgcagaactctactggtttgtggcaggcgaggcaagtagcaatgcaaatttgtgagcctttgctaacatgtggtttccccactttttcttaatgcggaatggaaacaattaaagattccgcaggatttcaatggagcatcccgtattaccgtcaacggttcgcaaaacattaaatgccttctcccaggcggcgcgccagcatctccgggagtccggcggccagaatgcgcctttgcgcttcctccacgtcgtattccacgcggcgctggtaataaaccatgctgtccacatcaagcacgccgtaggcggcgcgggggtctccgtccctgggctggccgacggaacccacgttaataaggtacttgttggttttgagaagctggatgtccccggattcatattcctggatgctcccttcatggcggatgaaggtgcgggggacgtgcgtatgaccgttgaagcacaggaactgattgtcgcgcaacatgttgatgctgtgcgtggccgtgtccacattcgtgacgtaggaccaggaattgggcttgtcctgggtggcgtgcaccagaacgatttcattgggcaggatacgctggaagggggcgcggcgaagccacttcttctgttcttcggaaagctgttggcgcgtccacatcagggctttgtacgccacggggttcatgcctgccggattgtcttccccaatggcttcctcatcatggttgccgcgcacggtgggaatctggcgtccgcggacgaactcaaggcattcagccggattggcgttgtagcccacaatatcacccaggcagtaaacggcgtcgcattgaagctgttctatatccttcatcaccgcttccagagcgggcagattggcatggatgtcactgatcagggctattctactcatggtgttgcggagaaaaagcgtagcatctttccggggcgttgccaagtcgtgattaatagattcaatggattaaagttcagaatctgggtctataggcttgctgggaatgaaaaaatatggtaaagagtgatagcgtaataggtagattacataggatcaggcaaaaatgtaaagaataatgggaaagttgacgtttattgatcttttcgcaggcattggaggaattaggttaccttttgatgaacttggatacaagaatgttttttcttctgaatttaatgaagccgcatgtgatacatatgaggctaattttgggcatcggccgagtggagatataactaaaatcaaatcaaaggacattccttctcatgatttattactggcaggttttccttgtcaggcattttcaattatgggcttaaaaaagggatttgaagatacccgaggaactttgttttttgaagtggaacgtattcttcaataccataaacccaaagtaattttgttagaaaatgtaaaacaacttgtaactcatgacaaaggaagaacttttgatgtgattattaataggcttactggtcttggttatcatttaaaatggaaggtacttaacgcacttgattttggattaccgcagaaaagagaacgtattatcatagtaggatttttagatgaattaacatcttattattttaattttgattttaatagagttccatataatttaaattctgttctggagcctgatgaaaaggtggattcttctttgttcgcttctgaaatgattcaaaaaaagagaaaagagaaagtaaaagggaaaataattttttatccttctatttggcatgaaaataaggcaggaaatgtctctattttagattatgcgtgcgctttgaggacaggcgcttcttacaattatcttttggtaaatggatatagacgtccttcctctagagagctgttccgattgcaagggtttccagacagcttcaaaatagttgtctcgcatcaagaggttagaaggcaaactggcaatagcgtgcctgtgcctcttattcgggctgtggcccgtagaattcatgaggctcttctatcttcggaaagggcgcgttctactgaattaagctaaacatcaattatggaaattcctaggttaagagattccggacgtcgaaaaagtagagaaccatttaggttaaatgaaatacctgatgacgtcgtcataaatataggttctcatttagtctatttaatatatacaggacggaaagatatttctggtgacgattggggagacactttagcattggctattggaggagaacatctcgcaagcccccttggaatagctgatgttgaattaggaaagctggcatggtctgctaaaacagttaaatgtaaaaatccttttgaagcatcatccgtgcgtcttatttcaggacgttgttctcctgattattcctatggaatagttaatccccatgaagatgtgcaaaaaacaggtactgcggtattgaacatttggaatgagcgcgttaatattgctcaagacaattatgcctccgttcgcacttcggttttaattcgaagttatgatttgtgctcatatatacttttcgaggaagaaaatcatcgatactgcactacagattacgaatggaaagttaataataatggtaatttagttggatatttagtgaatacaggaagacaaatgtttacttggcaacctcacggttcgcagtttacaattcatacgcaaatacctgggtcggctcgacgttttaaaattaagaagccttttgctcttaatgaaaaagaggttttgaggatgcttaagtttgatccttcatggatttctttttgttgaattacccttctttatttttatggataaagtaagtccagagattcgtagccataccatggctgcagtaaaaagctataatacaaaaccggaggtggcagtgagaaaattactgcattctcttggctatcgttttcgtttacaacgaaaagatttgcctggacgaccagatattgtgcttccaaaatataaaattgctattttcgtcaacggttgtttttggcacagacatgaaggatgtaaaagagctacaatgcctacttctcatttggaatactgggaaccgaagtttgcgcgtaatattatgcgggataaggaaaattaccgtaaacttgaagcattaggatggagtgttcgtattatctgggaatgtgaaatcaactctattcttaaaaatcgtctagttccaggtttgcctcaactaaaataatgttacttactctttagtatttcttcttttttctaatgtctctaaagattctctcaggccgtccacggggtatttcagggaattggccaggtggctgctcatcaggtcgcgggcaatctcgtccgtcgggaacaattcccggaaggggacgcggtctttttcaggcactttcagcctgttttccaggacgaaaatattgctcaccaggctgggcgtccggttcctgggatccttgaacaattccctgcccagctccagcgcctcgcgggatttggagggaacgcggacaagcgcataaaactccttgcgcgccgtcaggggcggccctcccagctcccgggccttgcggtaggcttccgcagccttttcaaaatccggctggcggtaggtatcgctgtacatgttgcccagcagggattgcaggtaccagctgtccgggttggcgctgatgcctttttccaggaagctgcggcccttctggatgtacttccggaagccttcccttcgttccatgggagaaagccgcttattgtccagatagctggaggaggcgttattgcccaaatgccacgaaccgttgtcccagtaaaagtcggaatggggggcaagagaggtgatctggttgtagcggcgttccagattggcccagtcggaaatcaggaagcagtcgaaggcctccatgctcagcacggccgcgaccagggagcgcagcccccccagggaaaccatggcgagctgctgttccagataatcggaggaggagagctccaccggatcatccagcagccccgccgccttttcctgctccagaatacggttctgcaaaggcaggcgaatcatgccgaagcccagcagggcaatgatgaaaatggcgaagtttttcagcatgattcgtaaaatggttcagatcaatccatgttcaggtgcttgcggatgtccttgtccagaagttcccattccggcacggatgctccggcctgccgggccttggagagagggtctccccagatggccgtgtattcgacagggcgtccttcgttgtagtccacggcgctggacggaatgaaggagcccatgctttccgtgcgggaaaggtggaattccactaggtcatccggcagggtgtagccgcgggccttcgccgcccggactacttcctccatgatgcggcgcgcccgggcgacgttttccgggttttgatagagttccgcaatgctgatgccccccagcgccaggcacagcccgttgaaagggatgttccagacgagcttgtaccactggatttgctccgcggcgtcaaaggcgcgcgtcttgatgccggcgttggcaaacaattcggagagttcccgggccttttcagagccttccggtgaggggacgaagggtgcaaattgaatgttgccgccttccagatggttgacgtggcccggttccgcgcgcatggcgcagatgaagcacagacccacatagatgcggtcagccgggatgatgcgggcgatttcctccgcatttcccatgccgttctggagcgtgactacaaccgtatccggtcccatcaacggaggaagggctttggagaaaccggcatttgccgtgcttttccaagcgactatgacgaggtccaccgggccgacttccgccgcgtcccggtacaccttgagccggggcagggagatgtctccatgcaggcttttcacttgcaggccgtgttctttcaggtagccgtattccgaacgtacgatgaaggagacgtcctggccggattcctgaagcctggctccgtagtagcagccgagggctccggctcccagaatggcgattttcatgatgtgcggtgaaggtgtgtatcttgtattgagattgcctagaggccctgaacgttgcccttgttgtccagatagatgtgcatggcgttcggtgagacgggcagggccggcatgcgcatgatttcaccgcagagggccaccaggaagccggctccgttggcaatttcaaagtcgcgcacggtgacggtgaaaccggtggggcggccgcggagacggccgttgtcggaaagggagttctgggtttttgccatgcagatgggcaggtccgtgaggcggctggcttcaaactgggccagcttctttctggccgcgggcgtcagttccactccgtccgctccgtaaatactgcgggcgatgatgttgagcttttcttccaccggaagagcggattcatagaggggcttgaaaggagcggagggcttgtccgcagcttccaccaccatttgggccaggtttttgccgccttcccctccctgggagaagatgtccgcaatggcgcagggaatgccgcgttccgcacagtgcgccacgatggcgtccagttcctcctgggagtcgtcaaagaatttgttgacggccaccaccacggggcgcttgtagtgggcggcggcgtccagatgggcatccaggttggcaagaccttttttcagtgcggccacgtccgtgtttttcaggtccgccagggcggtgcctccgtgcattttcagggcgcgcgccgtggctacgatgacgatggcggcagggtccagtccggattggcggcacttgatgtccaggaatttttccgcgcccaggtcaaaggcgaacccggcttccgtgacggcatagtccccaaagtggagggccattttggtggccagcacggagttgcagccgtgggcgatgttggcgaacgggccgccgtgcaggaagcagggcaccccttccacggtctggaccaggttgggcatcagggcgtctttcagaagggccatgacggagccggtgatgccgagttccctggcgaatacgggcttgtcgtccgtcgtgaaaccgatcacgatgcggttgatgcggtcttccatgtccttgcaggaggttgcgaggcaaaggcacgccatgatttccgaagccggagtgatgtcgaaacccgtttcacgcgggaagccctgcttgttgagtcccacgatgacggagcgcagggagcggtcattcatgtccatgacgcgcttccacgtgactttgcgttcgtcaatgttcagcgtgtggaagaacatggcgttgtcaatgatggcgctgatcaggttgtgggcggacgtgatggcatggaagtctcccgtgaagtgcatgttgatttcatcaggcggcgtcagggagcttttaccgccgccggtggcgccgcccttgcggccgaataccgggcccatggagggctgccgaagcgccaggcaggcttttttaccgatggcctgcaacccctgcgccagaccgatggagacggtggttttcccttctccggaaggggtgggcgtgatggcggaaaccaggatgagtttgccgggtgcggccggcttgtccagtacgtccagcgaaatcttggccttgttgcggccgaaggggatcacgtcgttttcatcgacgcccagcttgttgacacaatcggagaatgcaggtgtgaccatgaatgcatgatgacggaagccccctctttttgcaagaaggttcatgggcattcatgtggtggaaacgtggatgttttcaaccatcatgggggtgggtccagggaaatcctgggttcaaggagggtacgggcagaggatgcgcgggagagggaaaattgggcggtgcgggcaccgttgtttttcaaaccgtgggagcgtgtccttccactatgttttctaatgaaagcgttccgggaatgagagcctctggaccttataaaaatttcccttgaaaccagggtatttcgggaaagaagccgatttgaagggttaccgcttcagcacagggcggtagtggcccgtgatggtataaaggaacaggcagtcttcctcctgcgcaccgcagccgatgttgtgaatgatcagcggcgtgccttcctccgtttttttatcggaaacgatgccgatatgggggaccgtgtcccccaggttccaggtaaccaggtctccgggcttgtaatccgccgccgttttagtgacggggacggaccatccctgacgactgaagaaggtgcggaggttgggcaccctccggtggtcaatgctgcggtccgtggttttcagaccccagtttttcgggtatttggagaagtgggccttcatatcctcatgcacggctttctgaaggtccaggccgaaggccctcatggcgcggatgaccacgtccgtgcacacaccggtttccctgggtacatccccgttggggtaggggatggattggtagcctccgttgtaggagaccgttattcctatctgttcgcgcgctttggcggccagtgcggcgttgtccgccatcaggcacgcggaacaggaaaggaagaggaaggtgagaagggcggcgggtttcatggggtagttgggctgggaaaagggtaaaaatcagacgaagctggcaaagccgatgtccggacggcgctgcatgccgtcaaatttgacctttttggtttcgttgtgggcacgctggcgcgcttcggaaagggattccccctgcgccacgacggccagcacgcggccgccgttggtttcataacagtttttgtccgcattccatttggtgccggcgtggtaaacggaggcattcgcaacgtcgtccagcccctggatggcgtcgccggagcgggaggtttccggatatcccttggaggccagcacgcagcagacgctccagccgttttggaaggagatttcttccggagtgaattctcccttggccccgtgcaggcagaaggaggccagatccccggagagcaggggcatgacggcctggcattccggatccccgaagcggcagttgtattcaatcaccttggggccgttcggggtcagcatcaggccgaagtacaggaagccgcggtagggcagtccgtcctttttcagcccggctacagtcggggccacgatttccttttcaatgcgttccagcatgtccggctccacaagctggcgggaggccaccgcgcccatgccgcccgtgttggggcccgcgtcgccttccttgaggcgtttgtagtcccgcgccgggcacaggatgaggtagtggtcgtccaccagggcgccgaagatggagacttccggcccggtcaggaattcttccaccagcaggcggccttcaccgaagcgcctgtccgtaaatacttctttcaggaaagcgtccgcttcttccttgctcatgcagacggccacgcccttgccggcggccaggccgtcaaatttgagcacggtggggtaaacgccgccgatgaattgccgggcttcctccagggtggcggccacacgggcctgcccggtggggatgtggtggcggagcaggaattccttggcaaattccttgctggcttccagctgggcgctttccttcaccggcccccagcagggaatgcccacgcgggcacaggcgttcgccaggccttcatccttcaccagatagctttcctccccggctacgcagaggtccactttattggaaaccatccagtcgatcagcgtaggcagatccctggcgggaatgggggctgccagacggttgatggcgtcactccccgggaaacagtacatttccggtgcggagggagattccttgagcgccttgaccagtgcgtgttcacgcccaccttttccaataacggctattttcatacgcggcaagtatgccgggacggactgattttgccaagctgaaatgaacggggaaggcactcccggcatacggttttttccgtgctgctccaaggggctttcatgattcaggggacggctgtggaacgtctgcgtgcccctgggcggtgttttgcttccgcgggaatcccggccatgaaaaagaccgcctgacacggaggaaaggcggcctgtgaaaagaagttgtttgtcctggctttagaacgggatttcgtcatccatgtctccaaagtcgctggacggctggttggagggaggcatggggggcggattgtagttctgggccggacgggactgcccgtagttgttggagcggggagctccctggggctgctggcgcggagctccgcccatgtcgccttcaccgccgcgggggaagagctggatgttttcaccgatcacgcgcagcttggtgcgcttctgtccggaggccttgtcttcccaggagtccagttgcaggcgtccttccacaaagactccgcggcccttgctgaggtagttgccggctacttccgcctggcggttccagagggtgacgtccacaaaggtggtttcctcctggcgttcgctgttgtcgcccgcatagtagcggttgatggcgaggcggatgtccgtgacggcggtgcctttgggggtgtagcgcagctcgggatcggcggtcaggttgcccattaagaagactttgttgagattggccatatggggtgggtgttaacgaggtgtgtgataacgtataagaaaggtgccttgccgtttgggaggcgtgtggctggtcgctagcaactatggccctgcacgtgattttgtgcaatactaaattgcggaatcgttcttcatcatgtctcctttctacattgcattcgtcatggaaccgtgaaaacttcacctccatgagtttcaagcaacggcggcgaaacggactgttccgggtttcctggagcatgtgccttttgctgtccgtgctggcgcacctgttcctgctggcgggaagctacctggttccggaggaatggctggcttccccgcgcccggcggaagcggcgcggcggcaggtggtggtgagcgcgcgcatggtgaagaaggtggagcctcacccggagggccggaggcaggcgccgaaggagcatctgcctaccatcgtgaagactaatgaggagcaggaaagcgccaccaggccggaggcccccaaattccagagcaacaggaacacgcgtgcggaaggcggccgaaaggacccggacagcagcagggacatgcctgcccaggagggcgtggagcgcgagaatggggagattgtcctttttgaccagaataggcaggatggcgacctgagccatgaacgggacggcaacaagaatgccgctcccggagcggccgccaacgttccctaccagcccctggagccgtccatgcctcccgcgggccatccggattccgtagaccattctcccaacagggagggcgttccgggcaaggcaagcgaggaaggactggcccggcagaaccgccgccccgcgcaggaaagggccatgcagcttccgcatgtggtgacattgccccggcccggtgaaccggagaagccggacgccctccaggaactggccaagagcattgcgaagggggcggacaatcctcccctcaatcttcccaacctgaacctgcctcccaatacgaggccggcgcagaagcagcctttatacgaccccatgtttaacgcggagagccagcccggcttcaagacgcatgagcagaaaaccaagcagacgggcaaattcagctttggccgccgcccgacactggatgtggaagccacccccatggggacgtaccaggcgatcgtttaccgggccatcggggagcagtggtaccggcagtgtgacttgaaccgcgacctgatcgtcaccggaaccgtgcgcatccgcatcctgattaacaagaatggcaaggtttcctccatgaggcagacttcccgcgtgggagccagcgaggtccagaagtccttcaccttcctcgccattaaacttgcccggctgcccgcgatgccgccggaggtgaggaacgcgctcgtcggggattcgctggaaatgtacttcgacttcaatttttaacaacctaccatcctacaacaacatcattcactgatacttcaccatgaactttatcaaggactgcatcacattcttccaggcaggcggcgttttcatgtatccgctggcggcctgttccgttcttctcattgcggccatcatttaccgcatgttcaatatgaagaggagcaccatctgtcccgccaggctgacccgggccgtggagcagtacacccgcggggccttggagcgcagcgaactggaaaggatggccgcggattcggattccgtggaggggcgcctggtgctggacgccctgaattctcctctggaggatgaagccgccctgaaggagatgatccaggtgaaagcccgcgaggagttcgtgacgctccaggcggggcttcccctgctggacatgattgtgatgatcgcccccatgttcggtattctggggactgccagcggcctggtgcagattttcagcgttttcgggatggatgagagccacggcatgatcgcgcaggggattgcccaggcgctgaacaccacgattgccgggctggccatcgccactcccgccgtaatcgcccacgtttattattcccgcaagctggagcgcatttccgcttccatggaagtcctgctgacggagctgatttccttccgctgccatcattcccaacgctgaacaggccatgcagttttaccgcaagaaagcaagaaccatgggggttcccatcgtccccatgattgacatattgaccattctgctcatctttttcatcgttcacacccagtggaaaaagccgcagtccctgctgaaaatagacgtgccgggcgcggagttcatggaaggggctccttccacggagcaacgggccgtcctggccgtgacggggaaatcctccatttccctgaacgggaacctggtggagatgaatgagctggccgccgccctggaagccctgaaaagggagaagccggacgtcaaattgcagcttgacgtagataaaaaggcggagtttggcgtcattgtcagcatttgggacgcgctgacgtctgtgggtattgacgcgggggatgttcctgccagaatagaaatcaacaaatccggcgcacagtaagcgccttaacacatatatactcccctccctcccgatgttattggaaatcgcacagtatggaaatccggtattgaaggaaaaatgccgccctgtagaacattttgacgacggcttgaaagccctggcggaaaacatgctggaaaccatgtacgccgcagaaggcatcggcctggcggctccgcaggtgagcattcccattcaactggtggtgattgatattccggaggaggaagagtccgtcacctggctgaaggtgaacggggaggacaaggagctttcagacatcatgcccttgatgtttgccaatcccgtcctggagccttacgggcccatgcatcccttccatgaaggctgcttgagcgtgctcaagatacgcgcttccgtcgtgaggccggattttgtcaaagctacggtgctcctgatagatggaagagaagtgacgattgactgcaacggattgctggcgcgatgcctgcagcatgaatgcgaccatttgaacggcatcctgtttgtggagcgcgtttcttctgcccagaagatcaccctgcgcaataaattgaagcgcctggctaccgggtattgacggtttcccggatcgggatcgggccgcctgtttggcgaaaagtcccggcggcgggggaaatcactcttgagctgccgcgataaagcgcggggttagccggtctgttgcatcatgaggcataatggtctgtgaaatttctggactgagtttctttctgcacgtgcctgaatccctctccataaaatttattttactccgcatctgctcaaggagtccattggggcgcgcagaaaatcttgatccctttttcttcaaatagagtgatgattcctcatggttccgctgtttggtttcctgcggtgcagagaagggaggagtatcttcctccttccagcttcccgatcatgccaggtctttcgtttggccgttgaggtacatgggcagagatgggggcgcagaggcattgcgaaccaatcgtccatcctttcttggctctttctcctactaatgattagggccggtcatcaacaaacgtcgctgtcagacgaagatgaaagttcggtcctgttcctgtggggcttccaaagaagtatgaccaatgcctggagcagaagggagaccatgttaaaaatgaagattgcaggaaaggagccgggaaggagaagcgtcacaaggatgttgaacaggcttccgcagaatagaaacctgccgcccagtcgctgaacacttacccatgcttcattactactgaaggcgtaaggggtgcgtattccgaaccatttgttgggagttatcttggggcaaacgttggccaggagcagaagaaatgtgttcaggcttatgaagatgactttggccgtgtctcccaggctgaccgtatttgccaggcttgtcttttgaatggtcaggcaaagataggaaaacaggacgaccaggaagaattccgcgtacgtggccatcttcgcaccaatccgcctgttgttttcattcctgctgaagtgaatgggcaaaaggatgatcagacggagaatcttcccgatgaggaagccgaggattcccaggccaatgaatcccagaagagcgtccatgccgttcttgtcctcaaaacgggtgggcatgccgtattcattgaaatgtacggcgacgcgggcgggcagccgtgacgatacggctgcatagtaagttagcacaggaaacagggctatgacaagttcgttgaaaattggcccgatccaccaggatggggaagattgagcagagagcggggttggctgcatggcgtttaatgattgggctgggttccgatgattttgctccattttccggaggatgtttcgcgggccgccttgaaattgcctatccagaccagtatttcttgaagaacgctcaggttgatatcgtaaaagatgaatttgccttccctgtggtcgcggacgagatcggcttcttttaaaacagacaggtggcgggagatagcggctccggtaatactgaaatgttccgcgatttctccggccggcatggcgccgtttttcagtatttccagaatttcacggcgtgtggggtcagccagggctctgagcgtaggttgcagggaagagggattattcattttatatttaactttaatgttaaatatttctaatatggattcccggcgaggtcaacaaaaataaagagaaggaccgaacgggaacacttgtttatcacgttcctgcgccgctctgatgggatcattcctgaaaccggaccgccgtccgctatccggatacggattccaaggatttagtctaaagctttcccacgccgcaagcctttacagcaaactgaatcatttgtgcggatggagaacgtacggtggggaggagcgttcgctgacgcttccagtttcaggtcgaatgctgcaaatgctcgctgcgttccaaggggagcttcaggaggctgccgcagggaccggagcgttctgtgattcccttttgacgcggatttgcaggtccgccagggcgttcatgtagtagatgtacgcgtcaaaggctgaggcatacggggtgaaggagttttccttctgcatgtaatggaagtggtccgcgctctggagcttgcgccagacgtgggtgaggtccttgtcattggcggccttgaccggtttttccaggcggtagattttgcggatggcttcgtcctgcatgacgttgccgttccaatgggacatggttccgaaggtggagcaggtcatttcctgggtgcattcgcagacggagacgggcttgatttcacgcaccacttcagacggggtcatgaaccggttgccggcatccacgcaggcaaggatcatggtgcgccagaattcaaagacgcccgtagcgtcagactggcgttcgccaagcgtctcatagtccatggacagggtggtgacgctgccctgctggtgcgtcagccagtccgcgaaggtggtgggggaaagcgggtattccggccattccggatcggttctcatgatcgccaggtcattggagagttcccggttgcggaatatggtggtggtgttatagacccacggggccaggaatacttcattgctggtgaatcccttgagcatcgccggattgccgtccgccatgatgcccttgaagccgagcgtttccgcctgcgccgcaatggcgttggagtacagcatgccggtgttcatcagcacgtctgattcctggcggaagagttttttaaggagttcccggtgctcttcaatctgttccgcaaattcctgcggtgagtagacggaggcgagggagttgtagtacggcatcaccagaaagtccacgcagccggtttcagccagctccttgaaggcggcaattaggtccggcctgtggtacagggcctgttccagaatgacgccgctgagggccagcccgaagcggaatttgccccctgtgagttcgatgagctgcttcatcagccgggtggccgggaagtagcagcgttccgccaccgtgctgagcacgcgggcattcagatcgtcatcttcatagaaggcgtgttctccaattttgaagaagtcgtaatgaatcagccggttgggctggtgtgccacgaaagtgagggaaatgttgctcatgtacggggaaagggctgggagttatcgtgtggggtgaaaaggcggttcttagcggttcagcacatgttcgtaaacccggatgaccttgtctgcggcggcgtcccaggtggaggccttgatgtcctccgtgctttgttccaccactttccggtacagttcctcatccgtgcagagatggacgatgtgttccgccatcttgttgacatcccagaagtccgctttcagggctcccctcatgacttccgccacgccggactgcttggagatcacggcgggaatgttgaattgggcggcttccagagccgacaggccgaagggctccgatacggagggcatgcagtagatgtccgtgatggagaggaggtcattcaccttgtccttgttcaggaagccggtgaagtggaatttgtcgcccacgcccttgaaggctccggattcaatcaactggcggagtttttccccggtaccggccatgacgaagcgcacgtcgtccgtctgctccagaaccttggcggcaatttgcaggaagaagcccggacctttctgggccgtcaggcgtcccaggaagagcacgagcttttccggaaattttttctttcccttgaaaaccttgacggggtccgccccgttgtggatggggaagattttatgggggtctatggcgtagtgcccgctggcgatggtgcccgtgtatttgctgaccggaatgacggcgtccgcctgttccatgccgaatttttcaatatcgtaaatccatccgcgggcgtccgctccggcgcggtcaaactgggaggcgtgcaggtgcaccaccaggggcttgcccgtggcttttttcacctccacgccggccaggtaagtcatccagtcatgggcgtggatgatgtcgaagtcctgctgcatggcgacttttaccgcgattttggagaactggatgactttcagggccaggtccccggcatagaggtcctccttgtttttgaatagctggaggtccgcttcatgcgtcttggagaaggtgatgcggccttccttggtgaactgcaccacgccggattccccttccatggtggtgtaggggtccagttcaatgggggcgtgctccaccagggcgaagctgtcataggaatacttccggtccacttgctccacttcccgataggagacgttgttgagaccagtgagctggaacccgtcaaaaagaacggaaggatcggccttggggacgatcactcttaaatccactttttttgccagcgccttggaaaggcccaggcaggcaatgcccagccccccgttaaccaggggtgggaattcccatcctaatgtaagaactcggattgtgctcattggttgatgtgggttgtcggtgtcgggaaggaagcggcctcatgccgtgttgtgcaccaacgcaataaaaccagatttttcatgttcggtctagagtaatatgagtaattttgtcctaataatgaaaagaaaaatggtggtttagttcaatcttgcgttcgtcatgaaattaatttaatctgaatcgaacgcttttgattctctcttctgtttggcttcaatgtgcacctctcccaacatccctgaaagacgaaaaacgccccctctccgggggcgtctcgtcaaatgggaatacaccaatgcggtttctaaaataactctcagcgtgtgccttgcggacgatggaattgtccgcgtgacgtatttcaccggaccggtgccggaagatgagcccagctatgccgtcagccccgggtattccgctcccggcgcggaggtccgggagtatgacgaagccggagtgcatgtcattgaaacgtccctgctgcggattcgcatccgtacggaggagcaaaaggtggatttttacgatattgtcacggacgaacccctgctggcggatgaaggcggctttggccgggagtccaaggactggacgggggacgcccgcgtgtggatacggaaaaggcttcaggacacggagcattttttcgggctgggggacaagccctgcgccctgaacctgaggggcaagtatttctccatgtggggggcggaccattatgattttcacgaggaatcggatcctctctacaagagcgttccgtttttcctcagcctgcgggaagggaaggcgtacggcctgctgtttgacaatacgtgccgctcgtacttcgacttcggcgcctcggatgaaaaggtgctggctttcgggtcgttcggcggcctgatgaattattacttcatttatgaccgcagccctctggacatcgtagccgcctacacgcgccttaccggcacgcccgaactgccgccgctgtgggcgctgggctaccaccagtccaaatggagctattatccggacaaggccgtgtataacctggtggagcggttccgggacctgggcatcccgtgcgacgccgtccatctggaccaccattacatggagcagaaggaggggtttacgtgggacaggcacaatttccccgatgcggcggggatggtccgctctctggaggaggtcggcgtgaagacggtcctgatcgtgaatcccggcgtgaagatcaaccccgccaatcctgtttgggcggagggtttggaacggaattatttctgccggcggtcggagggcaatcttttgtcggaggaagtctggccgggactctgcaattttccggatttcacggccccggccgtccgcagctggtgggcggacctgttcaggcatgatctggaagaggtgggcgtgcgcggcctctggaacgacatgaacgagcctgtcgtctttccggaccgcacgttcccgatggatacgcggcatgagtacgacggcatgccctgttcccatgaaaaggcccataacatttacgggcagtgcatggcggaagcctcctggctgggcatgaagcgccacgctccggacaggcgccccttcctgctgtcccggtccggttttgccggattgcagcgctttgccgccacctggacgggggacaaccggtccagctgggagcatttgaagctggccaatttccagtgccagcggcttgccgcctcgggcatctccttcgcgggggcggatgcggggggcttcatggggcatcccacgccggagctgttttgccgctggatgcagatggccgcgttccacgggcttttccgcaatcattcctccggggaattcggaggccaggagccctgggtgttcggacaggaggccaccgcatatgtgaaagccgccattgagggccgctaccgcctgcttccctacatttacacgcagttccgccgttacgcggagacggggatgcccgtgctgcgctccctggcccttcaatgcttcaggaacagggacacctactggcggggggcggaatatttcttcggcgaccatctgtacgtcattcccatccatgagccgcaggaaggaggccgcttcctctacatcccggaaggcgtctggtattcctaccacacggacagcctgatggaggataccggaaaggatgtctgggtgaaatgcccgctttccttcctgcccgtgtacgtgcgcggcggggcggtcattccccattggccggtgcagcagcacgcaggcgaactgccgcggcccccgctgacgctggacgtctggtgggcgccggatgaggaagtggcctcccacctgtatgaggatgcgggggacggctatgcgtaccggaacggggaatgcgccgttcatgagttcctttaccgcggcaccggttcccattccctggaactggcgtggaagtgcgaaggggacccctgcgcgttccatgagtccgcggaggttgttctgcacggcctgcctgccgggattgccctcagcgcgcacatggacggcgttccctgccgtggcgtggcgagggatggccgggtatggagaatcccggtagagggcaagtttgagacgctttccgcctgctggacggaggaatgacaggcgggaatgtcagggaagcaggaaactgcgcctgaccgtatcccgctttaatttcagctcccgccattcatgcgtcagggtggaggaggccaccaccccgcccccggtgcagagcgcgagccgccgcccctgccagtacatggaccggatgcccaccaggcagaagaagtctccgtcttccagaaatccgaacggagcgccgaaatgggacggacagcggaggcgcgaacgccagtcgtccaactgggcgagcgtcttctccgtccggggctgggatcccagggccggagtggggtggagcagccgtatccagtggtccggcggcagcagttcgtccgcttccagggtgaggtaggtggcaaagtggatcagggtatccaggttcagcacgctgcgggccgttctggtgacgctgccgtagggggacaggcgggaaaggatgctgccggccacgatttcatgctcgcggatttccttgtcgtcattgatgaagacgccctcgtcttccggccgcgccgttccggccagggccatggtcgtcaggcggcgtccctgctggtggaacagggtttccggggtggctccgcagaagccttcctgctccgtccaccaggcataggggtaatgaagcggggaaccgttgacggcccgcaggatgagttcacggggaacgtggggaggctgcatctctccaaactggggcgttgccggaacgcttttcaccagatgtccggaggcgatttgttcaatcatttccgcgaatacctgggcatacgcgtccggggacggttccgtccacaggatttccggagcgggcggcgtggggctttccggttccggaatgggatgcagggcggacggtattttccacggctgcgggtcatccaggcggaacgtgttgacatagaaggcggggccggaatccgggggggcggccgattcccggaagggcccggtcccgagaagaaggccgcgggaagggtgtctgatcagggctccggaagtcagcgtgcttatgtccatgcgggggccatgttaaaatgctgtggcagggaattccagctatttgaatgtttgtggagcttctcccgggagcgaaggcctccggccttcgtgcgtgaaacctcttccgcagcatagcgcaggggatttttcctttttccatttcctgtccggagtttgtaaggggccggagccccttactcccgggaatatgcccccggaaaacagaacctcgcgtcatgtcacgtgccttccccttttgaattgacgggaaaaagcactcaagtaagctctaacgagcttccgccccatatgcagatgatgaccagaccagcgccagccctttcttcctccgccgttccggtgaagaccatgctggcggaggtgcggaagccgctcggccccgtatggtggagcgtgtttctcgccagcgtgctgctggcggcgtggggcgtggggtggagttcctggcgcattgccgcggagggtgtgggagtgctgggtctgaacaataacgtagtgtgggggctggacatcgtgcattttgtcttctggataggcctgggacatgcgggcaccctgatttcggccgtcctgctgctgacccgccagtcatggagaagcccgattgcccgcggggcggaacagatgaccctgtgcgcggtggtctgcgccgccgtctttcccgtggtgcacgtggggcgtgtctggatggcgtggatggcctcccccctaccggaggtgagcggcatctggccggacatggcctcccccctgatgtgggacgtcatggccgtcagcacgtatttcctgctttccctgttgtactggtacatcgggctggtgccggatttcgcgctgctgcgggattgctgcgcggggcatttgaggcggcggtacggatggctggctctgggctggcaggggacggggcgccagtggcgcgcctatgaaaaggccagcctgctttttgcggccatcctgactcccctggtggtatccgtccattccgtggtgagctttgacttttccgtgacgcaggtgccggggtggcaccagagcatttttccgccctatttcgtggggggcgccattttgagcggcatggcgatggtccagttgattcttctgggggtgcgccgcctgatgtccggcagcggcgtccggcaggccattacgccggccattctggatttgagctcccgcttcgtgctggccctggccctggtgatgggggccatgtatctgtgggagcacctggccgtggtgctgaatggaggctctccggcgttgttcccgggcaggaatcccgtgaatgccgtgttcctgggcgccatggtcgccgggaacgtgctgctcccccagttgttctggttccgctccctgcgcaccaaccggtgggtgattgcggtcgtggccctgggcgtgcttgccggcatgtggatggaacgcttctggatcgtcgtgaattccctgaaagcctccctgctggccgccaatatcggggattattcccccagcctgacggacctggccatgatggccgggagcgtggggctgttcacggcgctgtacatggcgctggtgcgcgtgactccgtttttttccctgtgcgacgtgcgggaacagcaatccctgaacaaggagggcggggcatgaagaagcgcgtcacttccggctgggtgctttccttttcttcggaagaagcgctccttcaggccgtccggacgctggtgaaggaggagggcgtcttctgggaggtctgtgcgccttatccctgcgccgccgtccggcttgccaaccgccatgccgggagggccgtaggcgcaggcgtgcggctgtgggccgcggctggcggagtgtgcggattcctggccgtggccctgtggctttactggacgcagttctgtgcggaccctctcatgacccagggcagggtgcagggctgggacaactggcccgcgtacgttccccccctgtttgaagggaccttgctcggggccggacttctgactgccgccgggttcctgaaaggggccgttctcccccggtggaacgactgggcgttcgagtgtgatttcttcaggacggatgaacacggagacggttatttcattctgctggaaggcggccgtgaagatcgtgccgccgctcttgctgcggcactgcatccggacgcgagcgaatacatccatgaggaagggggccgttcatgagaggcggcgtaacggcgatagccgctctggttttgctgggggcgctctggttcatggtgagggatgacgggggcaggaatgccgcgccccatttgtttgacaatatgaacgagcgtccgctggcggacgcccagcaggtgcgggagcccttcactcccgcaggccggaaggtccgcctgacgccgccccatgctgtcgcgcaatccctgggaacgggggaggcagtccgtgaacgggggaatgaccgggattcctttgccgcggagggctcctatttttcctccggccgcatgcaggggggggaggaggatatcatgcccctggaattgggcggggtttcccgcagccgtgacgtgctggcggagggacgcacgctgtatctggcgcattgcgccgtctgccacggttcggatggaaacggacgcggcagcatggcagcttatgacacctaccctcagataggctccttccgggatgaaaagtatgcggcctattctcccggaaaaatgttcaggagcattcggctggggcaggggaacatgcccgctttcggaaacattctcacggcccgggaaatctggtgcctggtggcgttcgtccgccggcttcaggcgctcccggcgcccccgcaggaagagcgacccgttactagacagggggaacaccgtccatgaacagcaatatatcatcaaccggaagggaacgccgggacaggccgggattcggctgggccggacgttccgccgcccttgccctgtggatcatttccgtgctgctgtggtgcgtgctgatgcgccagtcttttaacgccatgccgtgggatgagatgacggtggccggaacccggctgcatgaatggagaaaaccgtttgccgccgccggaatggcggtgggcgtcatcggtacgggcgtttgcctggggtgcctgttctggctttgcctgtcttccctgacgggagccgggtggggcatcacgctgagacgggtgctggcggcggcctgctggggctttttacccggcgttctggtgctggcgggaacggtcggctgcctgactaccgtcatctttccggaggcggcccgctactggggcgtggcggatatttcctctcccgccgtccaggccttcggcgtgctggacctggctgatcccgcgtggtggaatccggcgtggctgtatgtgcgcatgggaatcatcgtagtgctggcctggagcatggcccaggtatgggagacgctggcggcggaaaaaaacgtctggcagccttccttccgccgggggggcgccgctttctgcatgattgtgacggtgatgatgctgggcgtgctggggattgacatgctggcagggacgggaagggccgttctttccatgttccccgtgtacatggctgcgtatgccctgctggcgtctctggcattagcggtgctggccgcggcgtgcctgaggaagctggacggagggaagggattgccgtggccgcgcctgggcggcatgctgacggccatggtgctggtgaaagcatacatcacgtactcccaatacatgattacatggtatgcctcccttccggctgaaatgtctttttatgacgccgccttctcctggtccgggctcctgtccgcggctctggcgctccagcttctggtgcctttcctcgttttgctctttcccgcgttgagacgccgcccgtctgcgctgggcgcggtctgcatctgcatcctgtttggctccctgctggaagcgtgctggatgttctgccccggccttgggctggaaccggctgcgtggggcacgtggctccccctcgtcctgctcctggtggcgatgggcctggtctgctgtttttccttcctgggggccttgagcgtccgcagggtatttcccgaatcacgatgaatgttcccgccgtcgtttcttccctgttccgccgccgtccggacgagtggctgcccctgttctggctggcggcggcctgcgtgctggggctggtgtggtccctggtccatgcctccggactggtggcgggtgttccgctgccgtggccggctgggcgcctcatgttctccttttacggtgcgctggtgtacggatgggccctccccgtcctgttttctttcatggcggagaacggatgcaggcggctgaaacccgcggaatggctctggcacatctgcgttgtgctggggatggccacgattatggcgggagacggaagcggcctgctcctgatgccctttgactggtgggtttgcccggtgtttgccatccttgctgccggcaaggcgtgcgctgcgtggttccggccgttcccgtggcccgtgcggctgctgttcagttcctccgcaggatgcacggcggcggcccttctggcgctgggttatacgcaggctttgtccatgaacggcatgctggacgcctcctccctggaaggcagcctgtcctgcgggctgatgtttgccgcgctgggagcggcggcgttccgcttgaacatggccaaaggccgcggttttggaatactggccgtctggatggccgccgtgctggcggcggctccggtggtaggcggcctgggggggctccggggttttcccgtgccctgggcgctggcggaggccggggccgtctggtcgtggtgcgccgcggttcccgccgtgctgatggcggtgtatctttggatgaaatccggtccggagaccgggacgtggctgaaagccgcggtttccctgcttgccttgctggcagtgtgggacgtgtttgccggggcgtggccggagctgatgcagttttccctgtccgcgtggcatgagacggaattgtggatcctgctgggagccggagcgctgatgatggccggaaggaaggggcccgtgcggtttcctgcggcatggtggctgttgggcgccggcgtttgcggcgtgcttctggcttatgccgtgggcgtggttgccgcggtggatgttcaggcttttccggaagcccggcgcgcggaactgatgagcggctgggtgggcctggcggcctgcgtccatgccgttgccatggccctgtgcctagcgggaagcctttgcctgtggcgtccggcggatgccgggaacccggagatggaaactccggttccgcagcgtcttttcttcattgccgccgttgcggctgttctgttgctggctacggcggcggctgtcctgctgcatgctcccgcgccggactcactggaggtcaggcggcccgtccaggatgcggaaggcgccaggatttatgccgctgaggggtgcgccctgtgccacacccaaatcatccggcgttccatgtccgggaaggactggcagacggcgatcgaccgcggcacggacccggatttcccttaccgggtcagcgagccggaagacatggatgccgaattcaacggggagggcgctccgcaggcgggcgtggcggcggtagggccggatttgagcaatgcggcggaatacgccgcaggcaggctggaatatgaagacgcggtatccggcggcacgcgccgcgccgcgcaggtaagggaatggctggcccttcatctttacaacccgcgggaaccgcagtttaaaaagccctggaccgtgtgcccctccatgcccggcatgtttgaagaacgcccggtggaggggaatgccccttccctggatgccctgcctgtccggatggagcagggccgggaactggtgccttccgggcgcggggaacggctgttgaactatcttgcttccctcaggagagtggaaccctcccggaaacgcgaccggattcattcttttcctggcctgtcccacattcatccggattatgccgcccatcctcccacggtggacatggaacgcctgaaaagagcccgtgcggccgccgtcatggaaaaaggcaggggcgtgtacctttccaaatgcgccatttgccacggcaacgacggcatgggggacaaggtgacctatccgcccctggccgggtccgaatggctgaaggaaaagcctgatgcggaaatcgtcaaaatcattctccaggggctgaccgggccgatcacggtgaacgggaaggaatggaatcccaccatgctgccgcccggcgtgacgaattcccgcgacctggcgaacctgctcacgttcctgcgccgccagttcggcggcgtggaaaaggcggcctacacgccggaacagatggacgccatccgccgggagctgtaacggcacatgtcattacggttgccggccgctccccgcgcggcatgttttttctgcacggtttcaagcaatgcaggagggcggttgcggaaaaattccacgctttacgcttcttgaatacgcggcggaaacagaggcaaatgccattccatgaatttggaaaatacgtccgccattgcttcggacaaaaacgtgttgtcgggacaaatgccagcgtcgacaatcgcactgacaatgtcgtgataggttatcaatcttccaccagggatgaccggggcaccattgcgggctccatgtccgtcggcaccaattccgccggagccgccctgggggaccatatcaaggtagggaactcctgtgtttccgtaggctcctggtccaatacggcccatggacatggttgccgccctagtggaagaacttgccggaggctccgcggaactttcccccgccgctttgccttcccggaaatcccgggaagcggcgcctgaacggaccgttccgctggagccctgcgaactgacggaaaaagggagcgtctgaatgaaaagagtttccgtgacggactgacgccgtttcccaggaaacatgacggggctgccgcaccatatccaagtgcggcagcccttttatttaaatagttccggcttacaggacgagcatgtcccggtcgtcaaattcatcgttcggtccccaggcaacttcccagtaatagccgtccgggtccgcaaaatagccatggaagccgccccagaaaacatcctggggttccttgacgatcctggctcccgcgttccgcgccagttcaatgatttcaactacctcctccttcgtttttgcattataggcaagcgtaattcctccgaacccggcgccgatgggcggaggattctctccgttgatgtcctttgccagcaaatccagcggatacagctccagtttggtgccgggagtgctgaaaaagacgacgtccggatggtcgcccgtctcatccgttttaaaaccgagtccgtcacggtaaaattgcagggccttcttcatgtccctgactccaaggcagacgatgttcattctgttcatgttcttcttcatgggatggtatttgaaatgtttgatggagatggcccggatatcggttcctctgcaaaaaaaggctgccctccgcaccgtgtaccgggaaggcagccggatgaaagtggccggggaaaaggtcagctcagggcttccaccagcttgtcgccgtaggcggagcaggaaagctccgtggaaccgggaatcatttccgcgaggtcgaacgtgaccgtttttgcggaaatcacttggtcaatggcctgaatcagcaggtctgccgcttccgtccagcccatgtagcgcagcatcatttccgcggacaggatgacggagctggggttggccttgtccagtccggccagtttgggcccggtgccgtgcgtggcttcaaaaatggaatggcccgtcaggtaattgatgttgccgccgggcgcgatgccgatgccgcctacctgcgccgccagggcgtcggaaatatagtccccgttcaggttcagcgtggcaaccacgtcgaaattctccggatgaagcaggatttcctgaaggaaggcgtccgcaatgcaatccttgatcacgattccgttgggaagcttcagccagggtccgtctccgatgggctgggcgccgtattcccggcgcgcgacgtcgtacccccagtcgcggaagccgccttccgtgaacttcatgatattgcccttgtgaaccagcgtgacgctcttgcggccgttctccacggcgtaatcaatggcggcgcgcaccaggcgctccgtgccttcacgggaaacgggcttgatgccgaagccggaactctccgggaaacgcaccttcttcatgcggtccgggaagatgcggctcatggtgtcgaaaaacagtttggcgtcctcggatccctccttgaattcgatgccggcgtaaatgtcttccgtattctcgcggaaaacgaccatgtccaccttttccggagccttgacgggagtttcaatgccgttgaaatagcgcacgggacgcaggcagacgaacaggtccagatcctgacgcagcgtaacgttcaggctgcggatgccgccgcccacgggagtggtgagggggcccttgatgccgaccaggtaggtccggaaggcttccaccgtctcattcgggagccaggtacccaggttgtcaaaggacttctgcccggcaaaaacttcataccaggcaatggaacgcttgccctggtaagctttcttcacggccgcgtcaatcacccgggaagccgccgcccaaatttcaggcccggttccgtcaccgatgatgaagggaatgatgggcctgtccggaacgcaaagcctgccgttctgcatggtgacggctgcgccgtccgtgggaggggtgaatgttaaattggccatgacgtgcgttcctttataggagccagcctgttttggcaagataaaagaacggaatggggaagtgcgcatcatggagctcttgatggccgccgggcctcttgtacaggcagtatcagaaccagcggtcctttccgggcggttcttccggctgtccggcttcttcccggaggcggcgcaggaaattttcttccgcctggcgtatcaagccgctctccatgatgtgcttccgggcgctttcgttcaactggttgacggcaatggcggcgtcttcggaagtcagcctgttccagatgccggcgtcatccctcacgattctgagggagccctccaccatctcgcaggaaaccagctttccgtgaagcccctccgcggtaatggggcctttgttccctgcgggaatgataacccggagcggctcgggtccctccaggtcaatgcctccgtgggcgcggtaggccgctttcaggatcagcgtctttttactccaccaccacgtggtggaataccggtattcatactcgaacgtccgttccacggtcaccaggttggctaccttctcgtccttctgcacgatcagggccacgccgccgtggtcggaggaaaaacccttgttgatcagggtgaggcctacctccctgcctgcttcaatcaacttttccgccacctccatcggtttttccaccggggcggtgatgcaggaccgcacgccccagaacagcatggccagagccccgatcaggacggcgcctttaaccagaacgacgacagcaggggaatgcaggaaggaggatgggggggtatcactcatgaaacgttgtacgggacgggaactcagggttccgggtcttcatgggaaccgtccttcttgaggggaggcatgaacagggccaggaatgtgaaggcgatgacggtcaggtcgtctatctggcctactccgggaatgaaatccggaatcaggtcaatgggggaaaaggcataaagagccgtcagcaccaggagaacaagcttgcgtttggtgaaaaggcgcggttctccttcccggctgcggaaataattgatggccctggtcaggaattgctgcctggacccgttgggtggaatgggaaacttgtttttcatggggctgcaagggtgaagttgcgggaaatggaaaaggaacgctccgttacggggagaaaaggcatgaatgcaggcaggagaagatgataccgcctatgataacgagcgccacaatcatggcctcccggctatttgtctgggaagcaacatagagcagggaccgcctgtaatcgtctttgatgggtggcttttctttcatcagggagcttttctgaaattatctcatgcgcttccggctgcgtccagagcaattcccggatgccgctgggagtatgtgtcctgccgtttaaaagagagtggaacgtttacggcaaatacgttatatgggagaaccttctttccagaatatcccttcatgacattcaaaccggcagaggggaaagagaatcaggcaccaaatagatgccggaaggaagaaacggtatggcgtgccgacaagagaacgcggcagggaaaggaaagggcaccctggggaattgcttccgtttctccgaatcttgttgcactcccttttgcgatgtgctggaatcgtctgatgaacaagtggtttttgttttctctgtgcatgttgttcggtgcagtgctttcgcctttgctggcaggtgaagccgagagttctccccctgatagcggcagggagcaggttgattcttccgtctggatcaatgatgaatcaccccatttggcgcccgtttattttacaggagtcatgtacaagcggagcaggtgggaaatcgatattatttccctcaacagtcatgaactgccggaaccgatgaccgtgactttggaaaagaagcctgcggggttcacttcttctgcaggaggcacgccctgctgcgggattattcccctcctgatcccctccggagcggaagaagaaccccggcggtggcgtgatgcgggagcttctccctctctggtgaaggaaaacaccccccaggctctttcccttttgcaggaatccgttttacaaagctaccagcatcaaattattaaatccataaaaatgtccatcggcatccttgaacggatgacggatgaaaaacaggcgttggcgctggaaaagagctgggcttatgaaattatagattatactttctggatattgctggagggaagtgttcccttcgatgcaagaatggcttatgtccaacgtaatccggacgtcctgaagcaatcgcagaaggagtcggacgcctattgtgaaagggttcgcattctccggagcaagccgtggagcggcaaattgcgcctgttgcaggataaaaatgagaatcttccggcggggggtcccagttgccttaatccttaattattttgttcatgaaccatggaaacattgaattcaggaaagtaagcggctttaagcggggaacattgtttgaattactgtcggacgcctattcctttgacgagaggtgggaggattgctgcgcttccgactggaaggagtttgatcattttttctttgataacccgcagattgcggaccaatacggttttataactgtcttgaatggcaaagccgtcgggctggcgtcgtgggacccgaggaagatgcccgaatacgtagagatagggcacaactgcattatctcctcctgcaagggccatgggtatggcaggatgcagctccgggaggcgcttcaaagaatcgtgaaaaggggagcaaaaagaatcatcgtcaccacgaatgcccgctcggttcccgcccggcgaatgtatgaaggcgcaggttttaagatttgcgggaaaaggaggaatgaaagccgtaccgggtttttcggggattacattgattatgaaatgatgctgtaagggaaagagcgcagcatgaaaggagaggggaaatttttccttgccgtttcccaagcctgtgcggcgatgtcaggaagctgagcgcagggttcatggagagtggaggaggctgcctttcccgcttgcctgcggtcattttctcccggcctgggcgaacatgaaggcggcattgacacggcggggggcagggggtactctcctgcggcatataatgatcagttttacgaatatcagcggggccgaggagattggggccaattgctatttgcttgaaatggacggcacccggatcgtgcttgacagcgggatgcaccccaagagggaggggatggcggccatgccggattttgattccatggagcccaattccgtggaagccgtttttttaagccattcccacctggaccacctgggaacgctgcccgtgcttcaggagaagcagcccgcggcggaagtattcatgacgcccgccgcagccgccctgtctgaagtgatgctgcacaattccgtgaatgtgatgagcgccaagaggctggacctgggcattgtggaatatccctttttcacccataacgacctggacaggctgagcgacgcctggcatgccaagtcctgcaacgaggtgttccgcgtgggcttccgccagaacgtgctggccacgttttacgatgccggccacattctggggtccgcgggcgtgatgctggaaggcgagagcggccatacggtgttttatacgggggacgtgcagtttgaggaccagagcatgattcccggagcggatttcccggaatccggcgtggatacgctgattatggagtgcacgcgcggcggcttccagcgcagcgcccattattcccgcccggaggagatggtgcggttcgggaaggcgattgcggagacgctggaacgcggcggcgccgtgctgattccggtattcgccatcggcaagagccaggagatgctgttcaatatccaccgtttcaagcagcagggggcgattcccgccaatacgcccgtgtacttcggcgggttgagcgcgaaggtttccctgctttatgaccgttttgccgggctgacccgcaggcacgaccatgagttcaagctgaaggaggaaataaagaccgtgcccctgccgcgcaagggaaaagccccgctggtgtgttcccccgggaatatttacgtggtttccagcggcatgatgacggagaatacgctctccaacgtgatggcggagcaggttcttccgcatgagaaaaacgccattctttttgtggggtatgcggatccggattcccccgcgggccggctgcgggccgcgcaggagggggatctggtgaagatgcggcccaacgggcagcccgtgcgccgcaattgcacggtggattgttttgacttttccgggcacaccacccgtgacgcccttgtcaattatgccgtgaagctgaatccaaggcaggtggttctggtgcacggtgatccggatgccgtggagtggatgcacgatacgctgtccgccagaatgccgggttccaccatcatcgctcccgttccgggccagcgttatacgtttgagtcatgagttttaccggagagagaaaaggccgcctgatcgtctttgaaggcatagacggcacgggcaagtccacccacatcggccagttgcggaagtatctggaggggaaggggctggaagtggtgcagagctttgagcccacgcgcgggcagtggggccggatgttgcgggattccgccgtgaccggacgcctttccgtagaggatgaggtagagttattcctgaaagacaggcgggagcatgtggagacgctgatcgcccctgcgctggcgcgcggcgcgtgggtgttgctggaccgctattacctttccatgatggcttaccagggcgcgcgtggggtggatacttccgtcatccgcgccgccaatgaagaatttgccccggtgccggacgccgtggtctggctggatattcccgtttccgtggctctggaacgcatcgggggccgcggagaacgcgatgcctttgagacggaagcgggcctgacggcctgccgcaacgtgttcgcctccatccatgaaccctggatgctccgcgtggacgcggacgccgggaaggaggaagtggcggcaagagtgcggaaggccctttccgggcattttcccgaagtgattagtgaataggcgtattccactggccggtggccgggagttttcccttaatatttaatccccggtatttggtcgctgcgccgcaggcgcataaaccgtcgggtccgggattccggcttccctgaaagcttcccggcgctccacgcaggtggagcaggcgccgcagtggacgggaccgcccttgtagcaggagtaggtgcgggagaagtccacgcccagttcatggcccatggcggcgatgccgcccttggacgtgcggatgaagggacgcaggatgcccagcccggcataggttcccaggcggacggcctccgtcatggcggccatgaattcctcccggcagtccgggtaaatgctgtggtccccggaatgggcggcaatgacaagctgctgcgctccgcagctttccgccaccccggccgcgatggacaggaagatgccgttgcggaaggggacgacggtctgcttcatcagctcctcgtcataggagccgtccgggatgtcgtccgcgccggagaggagggcggatttcaaatgggcggagatgggggagatgtcaatcacgcggtgctctatgcccaggctggcggcctgccaggcggcgcattccagctcccgttccgcgtggttggaggcgtagtcaaagctgagggccacccgcacgcggtggttccggtgcgcccagtgcagggctacgctggagtccagccccccgctgagcagtacggcggtttccgtcttatccatggcgcgcgtcagagggggcggttttccgggttgtgctccgccatggcggtcagctggatgccgccgcggggggagaaacggccttctactttcagccaccgcggggagatggcggctgccaggtcatccgtgatgcggttgacgatctgttcgttgaaggccgggtagttgcggtaggaggccaggtagtatttgagggatttggtttccacgcacttttcatccggaacgtaggtgatcgtcaggtggcaggagtccggctgcccggtgacggggcagagggaggaaaattcatgggtgtccagcgtgatggtgtagggacgcgtgccgcggttggggaaggattccagcttggcgtcgtcagggctggtgaagaaggagctttgtgagccgagtagagtcagaggttcggacatggatggttgatgttgtgttgtagtggaaattcagttttcctgcgcggcggcgtctttttcctgaacgggttccctgccggggaattctttcacgtacaggtcctgctgggggaaggggatggagatgccgtgctcgttgaacgcattatagatgtgttcccgcacggaggaaaggctggaggccttcgtcatgacgggaacccagacccatacgcccagattgacggagctgtccccgaagctgtccagcaccacgctggtttttttcaccttggaaaggaagggcagggaggacagcgtttccagaacgatttggcgcgcccgctccacgtccgttccgtaggagatgcccacttccaccttggagcattcgaacttgtggttgcgggtcatgttgcggaagttcttgttgaagagctgggagttctggaaggcgatgatggagccgtccagcgtctcaatcatggtggagcggtagcccagggaggagacgcgcccccggtagccgtcgcattcaatcatgtccccctggcgcaggcggcccagcatcagggacaggccgctgatgatgttttcaatggtgtctttcagggcaaagccgatgcccatgctcaagccgcccatgaccatcagcagcccgttgtagttggcgtccatgatgatgagggccgtgaagacgaagagcccccacaggaacagggaggagagggtgatgaaggtggggatgatgcccacttcatagtcctccccgtaaatttcatacagggtgtttttaccgatgaagatcaggtagttgagcacgatggcaatcaggatgaccgtgatgacgtggctccagctgaaggtgagcaggtccttgacttccgtggtggcgaagattttgctgatgatgaggtcccccatgtcgaaggtggcggcgggccagatgaggctgaacaggatgaggaagatggccaggcacgggagcaccagcttggagacgaaggggcggaaccacacgatgtcctttttgttccgttccttgcggtggttttcatagtggtgcagcaggtcccacagccccaccaggagcaggatgctggtcatgagcatgatccacgtcatcagcaccaggaaggccatgaagctgaacccggcccagcacaggccgctgcccaggatggtgagcaccagggagatggtggcgaagaagcggtccagccggggcagcttgtacctctggcgcacccaggtcagcagggaaaagagggagaccagcgtgaacaggacgggcatgaagatgtccacgatgatgttgggggccatgaacatgcgcagcagcatgaagaagccgcccaggagcaggtagggcatgtagatgcgtatgccggcgttaatggtgccgtatttgaggcgcgtcaccagggagaacaggatggcgctgaccagcaggaggaattccgcgcccagggaggccgcgcttttcagcaggtagtccggcgtgcgcagggaggagatgacgaggaccagcgccacgatgaggatggtggtgacgttggtgaaggcgtggcgcttgttgacgtggcccgtcttttccagcgtttttttgaaaccgagaaagacgatgaagcgggaaagccagtaggagcagaagatgatgcccagcaggatgaagccgtagtgcttgagcgtctgcgggtcagacgggagctggagcttgctgtccgcggaggtttcccacgccgccatgcacacttcataagtcttgaccggcttcaggaagatgtatttggccgcattggacggggtgtagaatacccggttgaacagggaggtgaacagcttgacgctttcattgttcaggatgtctatttttgccgtcatgctgttgaacagctccttgaggtagctgatctgctccttttccttttgaagggcttcctccagggagcggcaggtgtacagggcttcatccctctgcaccagggacggttccgagaggttgtccgtattcacttcctccagggattccatcagttttttgatgcgccctatttccttgtccagccgctcttcctgcccctggaagtccggcctccgggagtagtactgcttcaccaggctggtggcggccttgcagtaaaaggccagcgtaaagattttctggtcgtccagcgcgtagagcacggcggacatttcataaaccctggtgtcaaagtaattgtaggtgtcgtccgcctccttcaccagcgtctcccggatggccatcctcttctcttcattctttttcaggatggctatttcatggcacagggccatgatgacggtgtccatttccgtatggtccggttccgccgcctgcggctccacggggggcgtttcccgcgcctgttccggaacggcggggggcgcgtcagcctgctgtgccgcagcgtggcccatggccaggaaacccgccaggaggaaggcggcgcagcagcggaaaaacgtccggtaatcagggatgctcatgaacggttccagttctaggggctgggggcattacggtcaaggctatattcccccgctgcctgagacggctttgcggggggaaggcgcgcgctttccggcgcctcgtccggccgcttttttcaggaaccggcattccatgcccttattgatttcatgattgattttttaacggaatattggttaatttgaaaataattccatgaattgtatgaaggagccggaaattttaaccatagacgcccattgccatttattcaaccacgaggttctttcctggaggctcctggtggatttcatcctttcccgcatgcgtccacggggaacgcgggcgcgtctggaaaccgcgggaggcatcagcgagttgaagaggattatccgttttttcaagacgggcttgatggatacggagaatatttacggcaagctgctggcggagggcggctgcaataccgtcgtgccgctgatgtttgacctggattactgcatgaagggcgccgggtgttccgatggactccggcggcgcaaggggtataagaagaatgtaaaaaaagcggcgcggaaggaatgggccgcgctccggaaggaacttgatgagctggcggcatgcgccgggaagggggagagaagggagctgggggagatgaagcaggccctccgccgcctgtccagaaagacggaacggctttccctgggaaaacgggatgcgttccgggcgcaggaagaagaactgctcaaactggcggcggcgcatcccggcagggtgcttccgttttacgtggtggacccgcgccgccccggcaactgcgtgcacggtccggacgggacgattgacgtttcccccctgacggacaggctggttccaaggctgggcgggaagggcggtttttacggcttcaagctgtattgccccaacggctattcccctacggacccggcgctgatggccctgtacgagtattgcgaacggcacggggcgccgctgacggcccattgctccggcggcggttttgccagtttttccccttccatcacggtgcacggccatgtttaccggaatggagaggttgttccgcatgacggcgttctggagttcaggcactaccgcctgacggacaagctccgggtgaaggagaaggcggaactcctgaaccatccccggctgtgggaaaaggtgatggaagcttttccgcgcctccggctgaacctggcccactttggctgccaggacgaaggcacggaatggacggaactgatttacggcatgatggagaagttccccggccttcatacggatttgtcctgcattacggaggcgtccaggctcagggagatgcgggagtacttcctcagggctccggaacaggtgcgccgcaaattcctgttcggcagtgatttttatctgaaccttctttttctggacgggatgaaggagtacatggagaatttccggaacacgttcacggagcaggaaaggagggagctgatgacggccaacccttccgacttcctgggattgtcctgacggaaacaggaaacgctccggaggaatgtccggagcgtttgaaagaaggaccgttcccggcgggaatcagttcagggagaacgcacggattctccgcacggattcctcccggcccagcagggagaagacggaggaaaggtccggtccgccgctcagcccggtgagggccacgcgggcggggaacatgacggctcccatcttcacgccgttttccttggcaaaggctttcagcacgccaatgagttcgtggccgtcccattccggttcctgctccagcctgtccgccagtttggaaagcagttccagggcttccggctggaccttggcaacggcttccgggtccatgctgagttcaaagaagaaacggattttgtccggcacttccgccagcgtctgcaccttcgtctgcacggtggcgatggcgtcatccagaatgggggagtccggcagcccggcgttcaggcagaagggccgcgcctgggccgtgaattcttccgcaggcagggcgatgatgtgctgctggttgatccagcggcacttggtgatgtcaaatttggcggcggagtggttgacggcttccagggagaagcgttcaatgagctcctgcggggagaagatttccgtgtcgtccttgggggaccagcccagcagggccaggaagttcatcacgccttccggcaggaagccttcttccggatatgtgcccagggccgcgcctacgtcgcgcttggacatcttggaaccgtcctggttcaggatcagcggcatgtgggcgaagactgggggagtgacgccgaaggcctcaaacagctggatgtgcttgggcgtgttcatgatgtggtcttccccgcggatgacgtgggtcatcttcatttcaatgtcgtccaccacgttgacaaagtggaagatgtaggagccgtccgcccggcggatggccatgtccggcgtgttggaagcgtcccggtagtcaatggtgatgtctccgcagatcaggtcatggaaggtgacgggcttggagcggtcaaagcggaagcgccatgcgccgtcatcctcgtacacgcgtccggcatcctggagcttcttgaaataggcgtcgtaaatatcgttgcgctggctctggaagtaggggccgcagtcgccgcccttcatggggccttcatcccagtccagccccagccattccatgccggtgaagattgcgcgggtggcttcctccgtgttgcgggcgttgtccgtatcctcaatgcggaggatgaaggtgccgcccgtcttgcgggcgaacagccagttgaacagggcggtgcgggcgccgccgatgtggaggtagcccgtgggggaaggtgcgaatcttgttctgacgtgactcatgatgggtaagagagtaagggccagcctgcccgcgtcaagcagatacagggggtgcatgccaaaaaacggggctgcggcggcggggaggggcaacgggctttttttagcgcgttgtcggccttgcggcttgcctggaaggggcttttaggcttcatttaacgccgtgttctttttaaagcacatattccgtctgcgggagaagtggcagattcagagggatgatgaggaaaagccctttctggagcatctggatgacctgcggaccatgctgctgaggatggcgctgtgcctgaccgtcagcacgattctgtgcgccgggtttgcgtccaatctgatggacatcctgaggcgtcccgtcaaccaggtgtgggacatgtttgaggaatcccacctgcccgcgggaataggcctggaggcatgggggaaggccaaggaaatggctacggccatgacgagcctggacgactcccagaagaaattgcttctgaggcaggtttccccgtcccagggggatttgacggaggccgccctggtgctccgcggcgcgcagcccctgccggaggacaggaagaagatttttatcagggacggcagccccacctcctccgtgcgggagctggcggaggccctggatgccaaggaagccattctgacggacggcaccgggcggggcgccctcaagatgatgagcgcgttccagccgggggaggcgttcatgctgactatcaagctttccctgtatgccggggtggtgatctccttcccgctgctgctgtacttcctgctgcaattcattattcccggactgctggagcatgaacgcaggctgctgtacaagtgcatggcgatcggcttcgggctgttcctggcgggcacgctgttctgctacttcatcgtgcttcccagggtgctgacgttcttctacacgtattccctggaattcggcatttccaatgaatggcgcatcggctactacctgtccttcgccacgcagatgatcctgatgttcggcctggcgtttgaactgcccgtggtggtgatgcctttcgtcaagctgggcgtgctcacctacgacatgatgaaggccacgcgccgctacgccattgtggcgatcgccatcctggccgcggtcatcacccccaccccggacgtggccaccatgatgctgatggccgttcccatgtatgcgctgtatgaaatatgcatcatcctggcctggatgcatgagcgcaaggaggccgcacgcgcccgggaggaagtcgcccggtttgaagaagactttgacaacaacaattctccctacaaccagtaaatacatccaacccgcgccattatcatgaatctcctggaaatcatcatcctgggcattgtggaaggcctgaccgagtacctgccggtcagctccaccggacaccttctcctgacggaatccctgctgaacatgtcccagagcaaggaggctctggacgccctggccgtctgcatccagggcggggccatcctggcggtgctgagcctgtattttccgcgggtgaaggccatggcgcagggcgtgcgcggcaataatcccgccgggctgaaactgctggtcaacctcattctggccttcctccccgccgccgtggtgggcctgtgctgcgcctccctgatcaaggaatacctgttcaacacctacacggtggcttattcctggattgtgggcggcggcgtgattctggcgtactgcgcctggcgcgccagggaaggccgttccaatgaagggaactccggagcctccattgaaagcctgaccccggccagggcgctgacggtgggcgctctccagtgcgtcgccatgattcccggcaccagccggagcctgatgaccatgctgggcggcatgttcgtggggctgagcgtggaggccgccgtggaattcagcttcctgctgggcctgattaccctgggcgcggctacggcgcatgacgcgtacaaggacggggcgctgatgctggaatccttcgggtgggaagccctggccgtgggaacggtggtgagctggctgtccgcatggctggctgtgaagtggatggtttcctacctgcaaaagcacagttttgccgtattcggctggtaccgcatcgccataggcatcgtgaccctggtgctcctgtccatggggctgatgcattaaaaaacgttctccggcagttgaatgccggaggccgcctcccctccgggcaggcggccttttttattattttccgcggcagggaaaggttctttgaaaatgtaacctgattgtaacacacgggattgatttttcaggcatcatggggacatgaacatcacgtggtgcctgatagccgtatgggcgggaatagccggactggcgcattcccaggaaatccgcgacgagctgggcgcccggaatatcattctgccgcagaggcgcgtgattcttccggcggaccggacggtccggcagccggtcacgatggaaaaggtgaatgcccgcatcctggtgaacggacgctccgccgtgaccaccctggagctggatgtgcggaataacggttcttcccccgcggaggctgagctgctgctgcccgttccggagggcgtggtggtgaaaggtttttattatggggacggaaaagcggagtggaaggcctccctgatgccagcggacgaggcgcggcgcctgtatgaccgcattgtagcgcgcagaaaggatccggccctgctggaatttgcggggttcggggccatccggtccagcgtgtttccggttccgcccaggtcttccgtaaagcttgggattgtttacgaacaactgctgacccctgtggaggggcgtctggattacgtgctccccagaacggaagctctttccggggatgctccgtggacggtgagggtggagctcgcttccggaaaggacggtccgggcaacctcttcactccctcccatcagatggagcgccatcagctggagaatggaaccgtggttctgaccctggcggaggaaaggatgaacccgggccctttccgcctgtcatggctggaggcgcgcgggaagaaaggggaagcttcttccgggccggaagccagcgtttacgcctctcctgacgcctccggcgggaaaaacggctattttctggcgatggtgggcaaggatgtccgccccggtgaacactccattctccgggaagtcactctggtgctggacaggtccgggagcatgcgcgggaacaagctcgccagcgtgaaggaggcggccaagcagatcgtttccggcctgaatcccggagaacggtttaacatcatcacctataatgaaggcgtcaatttatttgaagcggccccggtggaaaaaaatggagcatcggaaaaagcggcccatgcatggctggatgccgtcgtggcgcgtgggggcaccaacatgcacgaggcgctggccgccgccttgagccagccttcccacgaggggatgctccccgtggtgcttttcctgacggacggccttcccacgatcggccgcacttcggaaaaatccattgcggctctggcgggggaaggaaacagggcggaaaggcgcattttcaccatcggggtgggggaggacgtcaacgcccccctgctgaggcgcatggcggagatttccggggggctaccgtgctacatcctttccggggagaatctggaggtcaagctctcgcaggtattccggcagttatacggccccgtcttccggaaggtgcgctataccgtctgctccccggacggcagggaacagccgggaagggtgcaggatgccataccctccggggttcttccggacatttattccggcaatcccgccgttctggccgggaggtacataggtacggaacctttcctgattaagggtacctgcctggaccgggataacagggagcaggcttttgccattaccgtggatccgcagcgcatcgccagcatgaaggatgattttgtagcccggctgtgggccgcgcgcaagataggcagtctggaaaccgctctgatggatatgggcggcagctcctccggcacggaagcgctgaggtccaattccaaaacggcggaattggtggaggaaatcatgcggctttcacgggacttcgggatcatgagctcggcagcctccttttttgccgatgacagcagttccggcccatggcggcgggatcatgcctccatggggagcagggggaatctggaggggaaggtgatggaggaattgcgcgaagggctgggcgccattgccctgcaggaaaatgccgtagccaagaagcgggaactgaccctcaacaagtacaacatccagatggaccgggagggccgtgccgtggcctttgacaatacggcccagattgcccagaacggatatttcaacaggaacggagtctggatggaaagcacggttcttgccatgccggacgcgggccgcgccgtgaagacggtccaggtgggcacgccggaatatgccgacgtggcgaacaggctcatccagtccaaccgccaggggctgttggctctggatggctccgtcatgattctcctggatggagaaaccgtactgatgcaaaacagttttccataaacaaacaactagtaatcaacaatcatgaaccgtatcatcgcatgtactgcattagggttgctgggcgcaggatcattctgcgcccaggccgaacccactcccgttccaacggacagcaagcctgttccggaaggaaaggccagatactccgtcaccccgggaccggagggggaaaaacaggacgctaaaaccggaaccgtcctggttacggtgaaaagcgtggacgcggaaaaatccgcatcagccgtgaccgtgaccaccaccggaaacggggttgtcctgacgaaggccgtgaacgccggtccggagaaagccatgggagcgcggaatgccgcctattccgtcactacggtgaaaggaaccgctccgggggaaatggaaatccgtgtgacgccgcgtgcggagggagcttcttccggaatttcagccgttccgccgcaggaaggggtgttcatcaccaggaaggcggcaagccttcccggcggttccgggaaggaaggtattttccgtatcaagccaagcgcggttgaaccggtcagggaagcggcctattccatcaaaacggaagggagcggctccgaaaagctgaccataagcgtggctcccggtctggaaaaaacttcttccggaggggcggccgttcctgcaaaaggggatgtggtcgttacccgggctatcgtgacggggaatgccaaaggggtgaaagacgccgcctattccgtcactgttgcggacggaacggctcccggagaggcggagatcagcgtaacgccgaagcaggaggaggcttcctccggaactcctgcggctcccgtccagggcgccgcggaaaaagatgaccgcgccgtcgttcagattgccctgttgctggatacctccagcagcatgaacggcctcatcgaccaggcgcgcacttatttgtggaagattgtcaatgacatgacgctggcgcgccagaacggaaggctcccctacatccagatagccctgtatgagtatggaaaccagggtttgtcctccagggacgcctggatacgccaggtacttccgttcacggatgacctggacaaggtctccgaggaattgttcaagctgaaaacctacggcggcacggaatgctgcggagccgtcattgaccgggccgtgaaggagttaaaatggaatacggatgatccccatgcgctgaagctggtcttcatcgccggcaatgaacccttcaaccagggcagcgtgccgtatgcggaagcgattgcgcgcgggctggagagggacattaccgtcaataccattcattgcggcaatgccggagactcggatacgcgcctgtggaaggacggagctaaaaagggggacggcagctttctcaacattgaccacaatgcggctcccccggacccggaaacgccctttgacggagaacttgccaagttgagttcctccctgaatgcgacttacctggcttacggttcaccggaagttcaggctgaaaggctgagcaagcaggaacgccaggatacgctggcgctgaaactgtcgcctgcggctgccgtagggcgggccagcgccaaggcgaacaaggcggcgtactccaatacttcatgggatctggtggatttttatgaccggaacggagtccaggcgctgggagatttggggactgccggacagctccccaaggaactggaaggtaaaacagcggaggaagtggaagcaatcgtgaaaaagaaggcggaggagcgcggagccctgcagaagaaggtaaaggagctggacgcccggcgcaatgaatggctggccaaatggaagcagcagagcgcttccagggacgccaaaccgaacaccctggaggacgccattatccaggctgtccggcagcaggcctccaaaaagcagttttcctttgttgaagagaacgaaacggaaggaaaagattcccctatgaatgatagagtgaagaaatgagtgctcctgcggggctgtccgggagtgccggcggccccgcagaatttttcttctgaaaaaacctgttttaccgcaacgttcctatttgatagattattccgcgcatgcaccgctaccgcattctggtcgtagaagacgatcatgccattagaaacggcctggcggacgccctggcggtgtccggctatgacgttttgtccgccagggacggttatgaagccatggagatgattcatgcagaggagtatgacctggccctgctggatgtagtcttgcccggagcgaacggttttgaactgctgaaacgcatcagggaagaccgctccaccgttcccgtgctgatgctcaccgccaagggcgcggaggcggacaaggtgaaggggctgaagctgggggcggacgattatgtggtgaagcccttcagcctgctggaagtgctggccaggatagaggccgtgctgaggcggtccccggaaaggcccagcgccgtcaaccgcgtcatgctgccggaggggcatctggattttgccgcccgcgccctggttctgggggaggagcgggtggtgctgaccaccaaggaatttgacctggcgcgccatctggcggccaatgccggaagaatcatcacccgtgaggaaatcctggcgagggtctggaagatggacccccggctggtggaaacgcggagcattgacaccacgatcgcccgcctgcgggaaaagatggggaaaaggaactccgccgtcatccgcaccctgagagggcggggatatgtttgggaggacggagcatgagcagccgtttttccttccatttgctgttgtggtcctgcctgctgattctgctgggggtgatgggatggctcagccattccatgctggatgcggagaagcgcaggctggcggaaacgcaccagatccgcctggtggagcagagccgcctggccctgtggcgcatggattccctgctggcctccatgatcgcaggggagaacaaccgttctcccggagaatatttccaggggaacgcgctggcggaagtccgcaaggaggaaggtgcgatgccggatttgtccggctttgccaagctgtatttccagatagacccgcggggaaacgtttcctctccccagaaggacagggaacggctggaatatgtcctgcaactgggaagatccggctggggcagccgtgtggtggatgccatgaagaatttgccgaggcctgcctccatctccgcggggaatgccgtgcagccggagaccgccccccctgcggaagaagcggtacaggtgacttccgtcgccatcatggatggaagggagcagcagaagaacggcttgcagcaggagctggcagtggaaagcaggaaggctttccagcagggaatggaagactacaacatgcgtaaaaacctttccaacagccagcaggagtacaatgtcagcgtcaaggtgaaaaagaaagccatggagcctccccggcgggcaaagaaggagattgcggattcgggacggctggtcgtttcaggggaggtgaatggcatggaaagtccggaaggggagggggattgcctggatgtggctggttccttgaaaaggaccgggaaaaaattggaaagcggggccggcgatattgcggctctcctggatatgggtgccgcggcattgactctggacgggaagatggtccagtttgaggttcatgaacaaaaggcgaatccggttccggtaaaggaaagcctggcggaaatgtccgtcacccgccgtgacgggttcgccaaaactccggaaagttacagggagttctccatttcctccctccagcccagatggcagcaggggaaggaatgtttcctgacgcgccgcatctcggaccacggccaggtatgggtgcagggaatctggctggactggggcaagttatccgcctacctgctggagtccgtagccgatattttgccggaggccaccctgtctcccgccgacgggcgggaggaaagctatctgaccctggccggaattcccgccatgctgaatccgggcaatcttccctccatgcccgccaattccctgcggacggtctggaattccatggcgatggcgtggttttgcgggcttctggccctgtgcggggtcattggcttcatgatcggcctcatccgcctgagcgaacgccgcgccgtattcgtttccgccgtgacgcatgaactaaggacgcctctgactacgttcaacatgtacacggaaatgctttcttccggactggttcccaagggcagggaaatggcctatgtggatattctgaaaaatgaggcgggcaggctgacgcacctggtggacaacgtattgagctacgcgcgggtggagaaaaattcggtctccctccagccggaaaaaatcccggtgacggacctcgcctccgccgtcattgcccgcatctccccccggctggccgccgcgggcatggactcccagctttacgtggctccggagctgcaagcggaggccgtgactgcggacatgaccgccgtggagcagatcgtgtacaatctggcggacaacgccgccaaatacgcatgttttgacggcagcgtcctgaaggtggaactggcacgggaaaagcgttttctggtcatccgtgtggaggatgaagggaaaggcatttccgattccctgaaagggaagctgttccgtcccttttccagatctgcggaggaggctgccggaaaacagccgggcgtggggctggggctggctttatcccgggaactggcgagaagcatgggcggagacttgtgcctggaagaaagttcccacggatgccgctttgccctcaggattcccctttccagggcatgagggcctgttccggaaaaacaaaattctttaaatcagccgtcattcaggttttaatcctttcctcaccctctttatttttcaagaaccatttccttttatgaatactccattctgccaaagctgcggcatgcctctgggaagcagggaagactgcggcaccaaccatgacggaacctccagtgaggaatattgccattattgctttcaggacggcgcttttacgtcagaatgcaccatggagcagatgattgaacattgcgcccggtttgtggaggaattcaacaaggagaatggttcctcctacacgaaggaggaagccattgctcaaatgaccctgttttttcccacgctgaaacgctggaaaaaacagtagaatgtcttttcgttccatcccttattcacagggaagggcctgtcctttccgcctttgttcgctggccgccttctccctgcggtacgggatgtcctggaatgtttaaaaaccccaggaaggcggacgcatattgtttaaagtaccctttttccttgtccgctttcggctcccctgctggccggaggcccggttcataacatgatccggggcttgtcttcctccggtttgcccgccttgctcgaaacagccccatggggagaacctttcagggtttcaggggtggattatctcctctgcggtccatgggagcctccggggccggaagaccgtggtgagggagacggacgggacggcgcagccgcaggaggcgaagacggcctgctgggcgcgctggcggacggcggcggggaagaaggcctggaaacggatggagggctgctgggacggttcatgcccgaatgacccggacgggaggcggatggcctggaggagggcgtggatggacggctgggacgcccgaagtcaggcctggagggccggttcccctccggacggctgatgcccggactatgcgtgctcccggaattgccggagccggggcggtggggattgttgacggacgggcgggagggctgtcccggctttccgaagtccggcctgccgtggctgccgccgggctggcctattcccggccggttatggctgccgcccggattacttacgggcggacggtgggaattgccgggttttccgaagtccgggcggtggttgggcctgccgggctgcggaaccggcctgttgttgcccgggcggtggtccggacggaaatgatccggcctgtactggggcttcatcggcggacgcgccatggggcggcagtaatgtgggcggatgtagtgcccgcggtaatagggagccggtccccacgtggggatgtagtaattcgggcggatcaggctgatggaataaatggggctgccgaacgtgtcataggcatagatgggcctgcctccgtaatatccgtaaatgggatagccggagttgtcatacatgtaggacatgccggagccgccgctgctgtaggagcctgatacgctgaaactgtcataataaggatcatagcaactggacagggcgcatccgagggcggctgccagcagcgagttttttaaaataacgtatgctttcatgatgttgaaacggggtgggttgttttttccctttgcttgaaaagcggcgggataaaagtacatttgtttaaaattattttgcttggaaacgggcttcctattgtcttagactgcaaaaacgttctacgtgatgggaattctctttcaagataaaaaaatcggactggccctgttgtgtgataatgctccgtatacgctggccatgacgctggcgtcctatgagaggtccgggctgctgaattattttgacgaggcctgcgtcgtttttccggaaagcgctggcaaagtatgtgaaacggcgctttcttacggactttccgcggagtcttctccggcggagggcggcttcataggggcgctccatacggcggtcaacgcgctggatacggattacgtgctgctggctgaggatgactgcatgatctgggagcacctgcgcggggaaactctggaaaaccagttgaaacgagcggtggagctgctgatttccggccaggcggacatggtgcgcctgcgtcatgcctggcgcggctgcacgcgctacaaggccgcctatacgtattcctacttttatcccgtggagcagctggccaccatgtgggtgcatgcggaaggcctgtcggaagcaccggactggatcaagagcatccggcgcttcttccatcctttccgctccaagcgttccatcggccgatgcgtttatgtggaacaaaatccccatctgcgctttcccgaatacattaccaagattgatgaaggctacatcattgacagtgaggttttccaatggaccaaccagcccaccctcatcgcccgctccagaatcaggcagattctgaccgggctggcgcaggctcccggcactatcggaaaactgccgcaggactttgaaaccgccgtcaacaacccgcggtggagggacgcccacatgaacataggcgtcatcaggggaattttcacttaaaggcgcatggcggaaagcggaaaggcggtgcggtatgaatgcaccaggtgcggcgcatgctgccgctgggccggagacgtgtgcattgaggaggatgaagtccgggaaatctcccgtttcctccacatggacgaacaggccttcattgacgaatgctgccgcctgagagccaaccggcgcggattgtccatccgggatgcggaggacggagcctgcatgatgctggcggaaggcggctgccggatcaatcccgtcaaaccgcgccagtgccgggactttcccaacaaatggaacttccccggctggcgggacttgtgccgtgccagggaagtggaaaaggaataaaagcctccggcgcttcttcaggattgtttacaggaactgcgccagatcccgttcaaaaccgggataggaggtattgatgcattccgcatccgccagcacggtatctccctgtgcgctgaatccggccactaggaagctcatggcgatgcggtggtctccgtagctgggcaattccgcgcctttcaggggagcgcctccgtggacgaccatgccgtcgtcaaattcctccacgtccacccccatgagccggagattggccgccgtggtggcgatgcggtccgtttccttgacgcgcagttcgcgggcgttgcggacgatgaagtctccctggcccaaggctccggccacggtcaggatggggatttcatcaatcaggttggggatttcttccggaagcaggctggtgccgtgcagggaatccgaaccgtacacggtaatatccccgtacggttcgcccgcatcctccggagaagtggtcacaatgtccatccgcacccccatccgtttcagtgcgctgatgacggcgttccgcgtgttgttcaggcccacctggcgcagcgtcaggcgggagccgggacggctggcggcggccaccatccagaaggcggcggaagagatgtctgcgggaaccgtcaggtcatgggcggcggggagcgccggaccctgggtactgacggtgaggccgtctaccgtgcagggcacgttgaaatggcggaacaggcgctccgtgtggtcgcgggtgacggcgggctgatgcacggtggtggcgccgtcggcaaacatggcggccagcaggatggcgctcttcacctgggcgctcgccatgggaagcgtgtaggaaatggggcgcacccggccgccgtggataaacagcggagcgcagcccggcttggcgccgcgggcttcaatccgagcgcccatctgttccagaggctgcatgatgcggcccatggggcgggaactcagggaggcgtccccgaacatttccgaatcaaaggggcaggcagccagcatgccggccagcagcctcatgcccgtgccggaattgccgcagtcgatgggccgttccggagccgcgggcttcatggcgacgcccgttatgcggaagcggacggggccatacccctcccgttcttccagcacttccaccttggcccccaactgctccatggcgcgcagggtattcaggcagtcttcactgcacaggaaattatccacttccgtcactcccttcgccaggccgcccaggatggcggcgcggtgagaaatgcttttgtctccgggtacggtcagtaccccttgcagggaagaaatggaatgggagcgaaggttcatggacgtccggaagaactaccctgtattggccgctgaatcaagccaattacgagacgggcgggaggggagaggatagcgccgggactccgggaaggcgctgggcggcggtccagaatggggttgattttccggaacggtgacgtatattaaggcgcgttatcggctgcatccgcctgaaaggaaggagagagcttttcaggatcaatggatcaagctggttttcataggtagtaagttggagcggccacgggagtgatcctgtggccgctttactttgtttcaaaggattattcgatattgacattcaatgcagtatggaataaaaaaggctgatgagctttattgtccggactgtctttctctgtaccgcgctgaacgtcgtggccgcctgttcccagcgccaatccgtgcagcccgttgcggaagcggccgtacatgtcagcatcggtgcccttgtgtacgacgtcacgttgaaagatgacggagtggaggtggagagaaggccgttcgccttatatgcgaatgcgctggggaagcagtaccctgttaaaaaggtacggaactatatagggtaatcttgtaaggccgtttttatcagtcatcgagggaatttggatggcaacaatgaaaggctggcgctgttcatcaagaattcggaaaaagtaaaacaaagagagcgatttccacaagactaaaggaaataattccgaaaaggtatttctgaaaggcgacgcctacaaggtggaatccctggccaaaatcctcttaaaggaaggatgggctaaaggcgcctctcttcagccggaggaggaggccgtttttctgcatgccccaggagaaaagaaatttcatccggtacctgccgcaagcggcaataccgccgtctgcaaggcacttaacaaagcgtgctatgaggcgtgcctgaaggagcccgggatttcctaagcccggatgagaacaggcaagggaacaaaaatgccctccgtcctgctttgggctttaccgcgcgccgctgaaagcgtatgtagtccgtgccgatcaggttcgggtggtcgctgttccggtcttcggaccggggtagaggaaagtccggacatcacaaggcagcgtgtcccgtgaaagcgggagacgggaacctcccaagggttcccggacggaaagtgccacagaaaacaaaccgcccggatggggttcatccccatgcgggcaagggtgaaaaggggaggtaagagctcaccgctccgagggcgaccgaggaggcatggtaaaccccgcgcgatgcaagacaaacaggggaagggttgcctgcccgccggatccccgggtattagtcgcacccgttccgtaagacgaacgggcgcgcggaatgcttcactgcagaccgcgtgagaaaaatgaccgcacagccggctttggccggcagacaaaatctggcttacagaacctgatcggcccctgtcttttttgccgggatgttttccgcctccttttccgtgaagggaaacgtccgggaaattgtccggttccgggggctctttggggttgcatgggcgtctcaaatgtgtagaatccgtcacctaattgccacccactatggagaagcttgttgtacacggaggttttacgctgaggggagccgtcaatatcagcgggtccaaaaatgcgtccctgcccattctggccgcatccctgctgacggatgagcctgtggtggtgcgccgtgtgccggatgtctccgataccaatttcatggtccagatcatgggccagctgggcgcctccgtggagaggtccagcggcaacgtgcgcgtggaggccaggaacctgcattccgaagccgcctatgaacaggtgcgcaagatgcgcgcctccatctgcctgatgggccccctgatggcccgcatgcagcggtgcgtgattccgctgccgggcggctgcgtgatcggcgaccgtcccgtggacctgcacatccgggccattcaggctctgggcgcccaggtgcagattgaacgcggcaacctggttatcgaagcgccccgggggttgaagggagccaccatagatttgaggggcgatcacggccccaccgttctgggaacggacaacctgatgatggccgccgtgctggcggaaggaaccaccgtcattgaatccgccgcctccgagccggaagtggtggacctggcgaacttcctgatcaagatgggcgcccatatccagggcgccggaacgcgccggatcgtcattgaaggggttgaaaaactccgcggctgcaaccataccgtcattccggaccgcattgaggccggcaccttcatggtggccgcggccatgatgggggacggcgtaactctgcggcgcgtctgtgaggagcacatgaccgtggtgacggacctgctccggaaatgcggccaccatgtggaattcaacgaacggggggacacggtcaccatcattgccgggaatacgcccaaatgcggggaaatcaagacggccccctatcccggctatcccacggacatgcaggcccagatgacggccctctttgccaccacgccgggcatctccgtggtgaaggataccatttttccgcagcgcttcatgcactgctccgagctcaagcgcatgggcgcggatatcaaggtggacaacggcaccgccgtcatctccggcgtggaaagcctgagcggcgcgcccgtcatggcgtccgatctgcgcgcatccgccgcgctggtgctggccgccctgaaggcggaaggcaccacggaaatccaccgcctgtaccacattgaccggggctatgaaatgattgacgaaaagctcctggcgatcggagccgcggtggaaagacagccggatgacgacaattaacgccgtttttgggtcctgatttgccggtgtaccgcattttttctttactgtcagggctccatatgctattcaccgaagtcctatgaacaaggctcaactgatcgaattgattcaaaacaagctgggtgccgatacgaccaagaagcacgctgaagaagctctggccgctgtgctggaatccatcaaggaaggcgtgcaggaatccggcaaggtgcagatcatcggctttggtacgtttgctaccaagacccgtgaagcccgtaccggccgcaacccgaagaccggcaaggcgatcaacattcccgcctccaagacggttgctttcaaggcctcttccgccctgaaggactaagacggcagctgcttcccaaaagagcacttttctttcagcaccccgtcctctgcggaccggggtgtttttttatgtcccgctgcggaagtccacggcttgaccggatggacgccgccgtctagaatgccgccatgtccagcagttttggtcaggtgttcagaatctccacctggggtgaatcccatggagccggggtaggcgtggtgattgacggctgtccgtccctcgtcccggtgacggaagaagccattcagcgggagctggaccggcgcaggccggggcagagcgacatcgtgacgccccgcaaggaggaagaccgcgcggaaatactctccggcgtgctggacggcaaaaccctgggaacgcccatcgccgtcagcgtgcggaacaaggaccaccgttcctccgcctatgatgaaatggcccacacgtaccgcccctcccatgcggactacacgtacgacgccaaatacggcatccgcgcctgggcgggcggcggcagggcctccgcacgggaaaccatcgggcgcgtcgccgccggggccgtggccagggccgtgctcaagcaggcctttcccggcatggaggtcatagcctgggtggatcaggtgcatcatgtgaaagcctccgtggactgggaggccgtgacggcctccgtcattgaaagcaacatcgtccgcacggcggatccctccgcggcggaagccatgatcgccgccatcaaggaggcgcgggacgccggcaactccctgggcggcgtggtcaaatgcgtggtgcgcggctgccctcccggactgggagaccccgtctttgacaagctggacgccacgctggcccacgccatgatgagcattcccgccaccaaggcctttgccgtgggctccggctttgaagcggcggacatgaccggactggaacacaacgaccctttttacatgcgggacggccatgtgcataccgtcaccaaccactccggcggcatccagggcggcatctccaacggagaagacatcctgatgcgcatcggcttcaagcccaccgccaccttgatggttgaccagcagacggtcaaccaggcaggggaggacgcccggctcaagggcaggggacggcatgacgcctgcgtgctgccgcgcgccgtgcccattgtggaagccatggcctggctctgcctgtgcgaccactatctgcgccagcgctgccagcgggcattgtaacgcggcttctttcccgtcattcatggactcctccctcacattctacctggttctgggcgcgctgctggtcggcttcatcgtgctcggcatgctgaaggggatgatcaagatgctcctgttcggcgcggcggtgctctccgccgtggcagcgtacttctggctgtccaaatacggctttacctatctctccttcatcaccagcgacccgcgggaatggatggtcaccgtgctgtccgtcgggggggctgcggcagtcttcttcatcttcatgcacggcctgttctggttcagtgacgtcttctcctgggggcggcgcatgggcttcggcggggccaagggcatcgtcaccaccatcctgatggcggcggtcgtctgctgggtgggcgtcatgtgcatcttctactacggctccatggcggaaatgacccgcgcccgcgaactggcgctgtaccacatggatcccagccgcaccatttccctgcccgccatttactccgtcaagaagtccatcacggacaatccccacctgaactggctggtggccatctccccggaacacgacccggaacgcctctccctggcaaaaatgattgcctacctggtgacgctcagcccggaactctccgaccagcgccgcacccagctggattgctacatgccccgctcccgcatcaccagccgtgtgctgagcctgaaaagcctgagcgaagaccccgccatccgcctgctggtagagaagggggacatgcagggcctttacaacgacgtcaagctcacccgcttcctggaagaccaggacgtgcgcaccgtgctgtcccagctggatgtggaccgcgtccttggctttgtcacggaaacccgccagacggcccccgccgggaatgaatatattcccgaagccacgccgattgaggaataaagcggggattcttttcttccctgaattgttttcattcctattatcctctttccaaaggttttcccgctgggtagtattggatatattcaagattgatttggcatggacaaagaaaaattgaagggggaattggaaaaatgggaacgagagatcgctcttgatcctgaaaatttcacggcttatgtgaagagagggaatgtcctggatgacctgggacgcagcgaggaagcgctggacagctacaacagtgctctggaaatcaaccctgcttacgataaagcctattgcaacaggggcattgtattgaaaaaattagaaaggaaggaggaagctttatccagttacgataaagcgttggaaatcaaccctggaaatgatgcaacccattacaacagaggacatattctggacgatctcgggaggaaggaggaggcgttgcagagctatgaaaaagcgctggaaatcaatcctggggaccatgcggcctactacaataaaggaaatatcctgaacgatctcggccggaagaaggaagcgttggacagctataacaaggcgctggaaatcagacctgattatgataaggcttattgcaacaggggcattatcctgaaaagtttaggacaaaaggaagaggctcttgccagctacaacaaggcgctggagatcaatcccggttacgatgcggcccattataacaagggaaatgtcctggatgacctgggaagaaaggaggaagctctggccagctatagtaaggcattggaaatcaatcctggttatggggcggcctgttacaacatgggaaatgtcctggatgacctgggacggaaggaggaagctctggcctgttataacaaggcgctggaaatcaaccctcatcatgatgcagccctgaacaataaagggcttttattatccaatctcggcaaaaaggaagaggcattggcttgttatattcaagccattcaaatcaatgccggtaatgaaatagccaaacgaaaccggaggtcgttagtgggaagcaaggaattctgggatggcctgtcagaaaatagtcaggtggatttatggagtggagacgaagatttcaatgtcctggcaagcagggaaaaactgggtggatgctccggcaaagatttatcctgtattcaccgtctgtgggtggaacaatataggcttctttatttgcttagcgctgaccttgagcaggtggggcattacacttcctctatggtttttgaaaccttgctccaaaagcagacggaaacggacggtcacgcaaatcccctgtcgttatgcagcctggctgcggctaatgatcctacggaaggcaccgtttttcaggcatttctgaaacaggattgtctgccttcccagagaattcagagccatcttgccgtattgcaggcttccttttcttctgccattgattccttgaaccagttccgcctttacggaaaaaacaagggagaggaaggaaccgggctgtgcctggtatttaaccgatccttttttgccaaaccgggagaaacgtccatgattgccgtccagagaagaggacgactcctcctccggaaaagagactgacatgcgccgcaagctccctctttactgggtattgtattatgattgctcttccggtcggttgcattatacccctgcatgttctgaatactcgttaaacagggattttaatgtttgcgaagacgcattgaaagagtctgaaagaaagaaattgcaggagataggcaaatcattgaagaatattcggatgctttttgagtgtatcagcgaaaaggctcaaaaagctgccctggagatgctgatttacctgaggcatctggtgaaggatgccgccttcaaggatgaaaaggaattgaggattctttctttgcatccttataatgaccagagttcccctctcaaggtactggagggaaaaaactgcctgtcggtcggctatttgccggttattcatgagggggaggaatatctggagaaggtgattgccgggcccaaattgagagattttgccaacctggtggatgtggccaaattcaggcttcatcggttgggcgggaagaagaaagtggagttttgccagtcgcgggcgcctttgagttgaacttgacgggaattcggaaggaatttgtaactttttatctgaggcggcaagataatgagggaaggagggtattttaactttgaaagccttcgccttgcttcggagggagcaagttgataagggggccggagtcccttattcccaggagcggcaaatggttttactggggacctgtttttcaggaaaaaagagcgcctctcccagccctgatgccggaagaagcgtttttttaaaggagtgtccgatttgaagatgaggcgttttacacaccttaaaaataaaaaaggaagaaacgtcaggaaagtttttccgcgagggcatccacccattccgggaaggtgtcgtcataatccccatcggacagggctaccggcagcagcctttgcgccttcaaacgttccaggaaggcatcgaaatccttgcctgcctggcagaagttttcataaaattcatccccaagggcgaagacggcataattgactgtggaaaggtcttccgaggagtccttcaatgcctggtacagcgcctctgcattggagggaggttctccgtctccccacgtgctggtgacgaccagcagcgttcccgcatttttcaactgttccaccgtcatatcctccatatcaaccactgttgcctgatggccgagctttgtcaatttttcccgggcctcccgggccaggctttccgaatttcctgtttccgttccgtagataatggtgatttccatgtgtgctggttgttgttacgacgccagaagttagatcaaactaactaatcaggcaagccaaaacaggatgcgtctggtcaaattttccctccttctgcgggctttccggacgtcagttttttcagtccattcatcttccatggattaaatccttccagagaaaggaaagtaatcatgagaaaagatccgaagccggagacgagcaagccgcagggcagcaaacggagcggcatgcttgcagggaaattattctaccccggattcctcccggcggatcgtcaatgtgtgcgggtgctggggaagggtaaagcaccagccgaagaggcgcacaaagcgatagtaaagccccttgcggctggcgtgctggctggtcatgaggtcgtagaaggccaggtcaatctggtttctggcgatgggcgcgccattcattttagcgtgcagcatggcgtcgtgaaacagggaagggaacagcatgtccggcggggtggttccccaggtgacgccgtcccagccgtagccgggagagatggtgaatgtaccgccctccgctttcaggcggatggtggggtcatacacgctgacggcggtccagtggccgaagtccgcctttttcctaccgctggtccagctgatggcgtttttagtgatgtagaagggttggccttcgtagagggttccttcataccatccggccacggcttccggagccttgacggggacggagcacgattccagcgccacggccatgcacgtcactgttaataacaggtaaatatcatgtgaataaaaaggagagggcataggagggcagggagtgttccgaacgattgtttttattggatttccagcacgatgatttccggagggcagcagaagcgcaggggaagaacgctgcatcccagcccacgggtgatgaggaagggggttccgttcagctgggaccagggataggagaatttggccttctcccgggagatgttcgccaggggcttgccgccgggcaggcagatctgcccgccgtgggtatgggcgctgatgacggcgtccgccgtgccgggagccagcaggggaaagatgtccggcacgtgggagagcaggatgtggggaatgtccggggaaaaacgcagcggcagttcctccggcctgattctcaggtggtagtcgtcccgaacggaggaaagctgcaaatctctgcctccggggaggtgcagcagcagggaatcgttccacatgggcaggatgcccagctcggaaaacatgttccgccacaggtcccagccgtagtactggtcatggttgccctgtacggcgaagatgcccaggggggccttcagcatcttgaagtattccctggctgtttccggactcatgctgctctcccgggtgtggccgttggcgtagtcccccagcaggaagatcatgtccggctgggcctccatgattttttccatgtaccggcgcgcctggtcgccgccgttcgggcgcaggtggaagtctccggcgatcacgatccggagcggggagccgcctttttccttccactgcggcacttccagcgcggtcgtgacggtttccacgcgcctgggttccacctgccacgcccacatgaataaggaaaagccgatcatcagtattgagacagagatgattgcaagtttgttgagaaggggatgacgcgggcgtgacttcatgcggggcgggctccggactgatgatgaagcatttcgcccggttttcaatcattcgtgtttgccaatagggattttgctggtatgatccgtcccgctcaaggtggggctgtccgatgactgcaggcccatcttcatattaacatcct
